United States Patent Application Publication US 2012/0108651 A1 - sequence listing, part 3

SEQ ID NO: 397 - DNA, 916660 bp, Homo sapiens
aactggtggtgatagttacacttctctatgaataaacgaaaaaccacataattgcatactttaaagggtgaattatatttcaataaaattgttgttaaaaatacaaaaaaagcgggaaaacatagaaaatggcaccacagcggaaaaaaaaaaaaaaacctggagaagtgaaaggtacttgaattcctgtcccactggctgtgtgatcttgacttttctgtgtcttagattcaccaactatcaagtggggatattatctctttgtgaaccttctaaattaactatgaggatactactgttaggaactaaaggctgaattcaaggactccctcattctgagaaatatagaaacagtgtacaaactaacttgtactataatatctgggccacccttcagaagcaggtatggatagtgaatggggcaactcctggtgagcatcaagacaggtttccatgtctagcactggttccttgaagatggttatactgaccgcatttctcattctcttgctgtatctcataagaaaacagtcagcctgtttctacattttacaaggggggaggctaagcccctgggatattaagtaaactctttcaagttaccaaatgtgaagaacctagaacataggggttctctcccctaagggagccaatacactttccattggacaagtaaaaaataggggttgaagtgttgagtccttttgcacagtgtgctaataaacctttgcttagtttggacattagaacctaagttggtcaattaggaaggaaggaaggaaggtagggagggcgggcgggagagagggagggcaggcaagggtacactgtctctctcaaaggctgtagattcagaatttttgtttcaggagtatgtaagggaggcagatttccttttcaaagttcaaagaaaatggtatgttttgttttcatacttcgtttcattttcacttgggaaaaatgccccagctttgaaacctctctgtttaaactcattaggaaaactatcaatgacagcagctttcatgcaatcatagtgggaggaattagtgttatgggagagctggatcaatcttcaaatgtttcatctatggagatgggaggtcagcaccggctgcttgttcagctggaaagttaacataaacaaatacttcactcactgggagagtccaagggaaagacatttgatattccccctctgaatacttcctcagaaggcacatgaaagagatagttgcttcttgagaactaagtggtcaactgcttggcaaaatgtctcatctcgaagagcaaggtgtttgttcttttagtgtctggaaaggaaaggaggtagggatgtgaacattcacagaatagaatcccttcctgtgtaattcctaacttcatcgaagttgatatggaaacccttttagcggagctggttttaatatatgaagatatattttttgatatccaaatatgttttaaaggtttttttgtttcgttttgtttttgagacagagtctcactctgttgcccaggctggagtgcagtggagtaatctcagctcattacaacctccacctcccgggttcaagcaattctcacgtctcagcctcctgagtagctgggattacaggcatgtgccaccacgcccagctaattttttgtgtttttagtagagatggagtttcactatgttggccaggatggtctcaaactcctgacctcaggtgatccacctacctcaagcttcccaaagtgctgggattacaggcatgagccgccgtgcccagcttcattttaaagttttttaagctgttgaagtctcctttgccaaaaatagaatgtggaactttgtttttgttttgcactttattcatagagcatattccatagcccatctgattgattcaaaatggggttaacagtgagaaattaaggactgcagatgggatgtctaaaagagagctaacaggagaggcctggtaggaggaggagagacagggacaaatggaggacgctggaagattagcagagacccctgctacttctaacaaagttgttctgcaaaaataaaataaaaaaatcttagaaaatgttcttcatgcctacaacatagcatggattaaggaatttgtgatctcagtatctgtaaaggttaactcaatattttcatttttcttacaagcattgcatatgtgggtatatgcaaatatatatacaggcaaaaatggaaaagtatatccacacacacaaatatatgactgtgtgtgtgtgtgcacatatgtgtgcgcacaggcatttgagcttgagtgcatgcactcaaaagaatacaggaataaagggactatgacaggaatacaggaataaagggactatgattagcagcactgggcctcattcctgccaagcccatcccaaggccaaactagagcctatcattttagatctcggggaaattaagcagacatagacttaagaaaacacaggctgtggttaactttccacttctttctactaagagtggatgaccaagcatttttgcgacatctagtcctctgttgctatcccttagttagctcatgagaaaataaggtgtaaaactaaactatccaagatatgaagccatccctgcccaacttaatgagcaactaactaatccaaaaggaaaatagccattacttacacagccataatgtagatgcaacatggcatataaatcagtaactcttgtattgcaaaacagacaaatagattaatgcatgttgcaaaggatgggtgaagagatcgattaggttactgattcagaccgtgaactttctctcaatatactgcatttaacttttaaataaggtttaggagaacctgtaacattttgctcactgacagagctatattttactaagggaagaaattggctagtctataaaaattaaattatgcccctttcactgtatctagtcaagaggaaaaactctaattacaagattgcactgtcaaacaaatgcaaattcacattctttattccctggtttaaaaattcatactggagggggcttctattctgaaatgaaaatcaatatttgaaatattttgcagagtgcaatgacaagcaagagcaaaagaagtgtcattatcaagggtgctagtaaatagacaccaactcattaagtgcagagctagtgagaacaagtcattcattatgcaaatatttaaatatcaattagtaaggacaatgaaagaagttgaaatgaaccttcccttccccacagccagtaccttattattccagaaatgaccaaagggaacaagagtggtggataataatctcagcacataatagcaatgtcactctggggaataggtaaaggttaatttcaaacatacttcccaatggaaaattaaatgtacctgcctcaaaatttttaagagctgagtttacagacttagtccagaaaactgaaggcctatgcatattgcatggctggtattttttggaaagagaacacctttcattactgcttaatgtcagactggcttagttcattaaattttcttagtcgatttaaagccctggtttttccacatctatgaaaaaatgcaagtccacatagcactcaaacttaaaaatctcactggttgcttcccagattcttttgacatccacttcatggcctgtctacctggactgttaggtgaacttggtggatatgaaaaatggcctaaactctttgaactttgcctggactatcttttcaggcagacctggcaggatattttacgacatgctggctgtgtggtattacagcaaaggtgttggcctgagaagcaggcttcaagcgcctcttagtaacagttggctggtgaacttggaccaagcatctaattttcctggaccttgctttcttcctctgtaacacaaaaagttttgtccagatcagttctcaactcgggtcaccccagaatcattgggaagtttataaaagacccatggccagatataccacagactatgaaatgggcttctttaagcagagacccaggcatgtggagttgaacaaaactcccagcaagattccaacatgcatctttaactaggagtcactgggctctttcagctctagtatgctgagattctcaggacaacatatgttattgatcaaacttgaaagaaattctgacttcaattcttaatagcatcatttaacaggcattactttctctggagaggagatgttgaccatgtaatagaattacatgctgactggctgtggcatgaggaaacaagatcctgaaagaggaccaccagatttcacgagattctatatgtgcaacccacagaaaagagtcagatgccttgggcgctcaacaacagttagctcttgttaatatgatgattatactacaactgtgttcacttaaagttttaggtttgctctctatccttattggcaaaaaattaaattggtccctaataagtacatggacataaaaatggaagtgctttggaggtataaggcccccctggacattgctcttttgatgcagaaacagatccgtttggcttgtttctgtggagtttaggcttagaatgccttgcttccatgtgcacacaccccgacctagcatccttcccttcaaaactttttcctttgagttcatcgactgcttctgtttgtcaaacttcacaattgaaactgccttattacttgattctgtctctacctgttgggctgtgacctgtggccagaggggcctggtttggagacaaggtacctaccttgtctgagcttatagaaagcgagcaaccttaggccagacacttgaagtctgtgctgaagtttctgtggataaaatggaagttaaaatgcctgctctgcttcttttacagagtggttttgaggacagaatgaagcaagatgaaaaacagcactttgaaaatggagtgtgtggtattcatcttagatacacttttagagaagaagaaatgtgtctcagaaaaaggacctcttctgactcaaatttagcttacatccccttctcaaccatatcccaggtgataaaatatgacacccaggtaagcagtggccttgtggactctgaagaagttcttaacgtgtccacggcacattctcattttgtctggctctaaactactgtctcaagaaagctgcaaatatttgaaagtaacaataaagtgttaacagtaattctgactaaaatcacagcagtccctctggtagaaaggcagtaaattctttgctcaggtaaaacgtaggaaagaaacacaagtagaaaaaaatcccatttgttcaaattatccctatcaatcttaagaattatcgccaagtttgttttgttttgcatcattaatagcccaaatcccacgtgccaaaataatgtttaccgcatttctcgagacaagttacccttgagagccagtatgtctgaggcttcccagaagagtgattttggtgcaacaaataatgacctatacaaaccagcccttacaactgcacacacaccacaacacaacacagtgtcaagctaacatctgctttccaaataaccatgaggatagcaatatgacatttccaggcccttctctgagaagaaacgactttcccaaggtgttggctttgaaactagagtccttgcattgatttgccagcgggtaaagggaatcatataacagttctaatcacttcaccgggctctgcaggcagttcacagaactaaaggaagtgggggctttggttcattcactatcagccatcaagttatgctatttcccatccttttaatatccttaaaatggcaaggtctgtgtttatggttttgaccttgaaactgaagtaacagctctacctattctcccaaagttccagatatactttggggaactttgacttctgataagacagctggggtagggggtgaggagagggttggaaagttctacctcagtgagaagattcttggtcaactagagggagtgagggctatcccacaagacctccccttcccccacaggatgctcaggacttcttctcagctagccagcagctaagctggtagggctgagaacggcattcctttgaaagatcttggcaatttgtgcctggaagttgatgcattagttctaaaattaaacaaagatcctgtagtgttcttcaaggaaatatggtgtgcctctatgacaaaacacatttttcaagctctgacctctgggagcttcaactagctccatatttcaggctgacaatgctcacaggctactgtctagttgcccaagccagggctggttagccatatattttctacctccatcagcttttagcatagggaggtgaagggagtaaataaaaagaggagagccactaatttacatgcacttcccctcccaagacccttggggagaagccttggtaattaactctaatgagattaaagtaacttggaactcttcattttcccagcactgtaaaactaaatctgcgataaccagtgtgtgggcattaaatcaaagtcagtcctttttcctgctatttaatggccccctcactcccaccccacagcccaggcttaagagcgagggggagggctgccaggctcttaccggcactttgctccatcacttctttctgacacatgtcttgaacgttcaccgtgcaattcacaatgaactcgggggaggagcagtcgttgttcagctggaattcttcacactggtagcactggatttgcagcgcaaagcctgcgagacagacgcagtcgggttcagatccggcccccacagagcccaccccggaaatcacgaccatcccacgcctcagagccaggcggctcccagcctctggcaggcttagaccactcctgggtctccgggtagggctggatgtggctgacaccggcagggggcggcgcgggtacctagggtcctacggaagaaagtggaatagtgcccgccacccctggaccccggctctagacacaaagcgcccatccattaccaccccaggccttttcccaagaagttgaagggagggtggggacggtaccaccgcaagagtgaagtagctctggagatgtgcgttagctccagcctaagccaaaggatttgcctaattgctaattggttacaaattacttaattactattttggcaccattcgtgattacattcgcagacgtctttttagtttttatttatttaatttttaaagtcagcgtttctgtgccagggctctgaggatccctgagcgaccacctgggaacaacttgggtggaggtgccagacgccaagcgctgctgcgccgcaagtccccgagcccgggtcggcggcccttctccggggccgtccccgcggcgacccgaatggccacagagggtgggaaagggcgtttgtgagcgcgcgcaccctggatccccgaccccgcagccctttcttccaggccccggctttcaggacaaccgttcgactagggtcagtggtcggggttccagctctgcagagcttagtcgggagccagtaggcgaactggagagaggacgcgagacctttgcgcctctggacgcttcggcctggctgttctcggtgtacgcgctcctgtctagacccaactacccacgctcccgcagccccacatctatcgcactctgagcgcagcaacccagcttcagcgtggccgcaggctgcctcgcgcatcgctcacctgtcggcggcgccactcccacggggtgccggaggcgccagacaacttggcagggttcgggagatgtcgccccctctccctcgcccagaacccagcaccgctcggaccctccctcctctcaagcccagcttctcccgacggtgcagccggacaagctgcagcccggagtcccgcaaacccgccgctccccgctctcctcctgcagcgcgggacttggacactttcccagcctcgcgccccggggcaccagtcgcggccgccaactcccgctgggcagccccagcgcagggctggccccgaggtgggcgccttgggggcaaaagggctggcgggtagatggattgtgcgcacctggcctcggctgctggcctctgggtattctcacctggaagcaagaacaatccgcaaaaagttgccgcgatgcctaggacccacattctcccggagtcccggggccgggagagggcaagcgcatcagaggaggcgacagcagcggaggctgccccggctgcagcggctgtggctgccgaggctgctggggcccgcgctgctgccgcggagacgacggtcgtagcttagaggagccgcaggtgccgctcgcggagcctgcatcgcccgcgctcgggctcccggctgcgggtctctgctcctcccgctcgcgctcccgggccgagcaccgcgcctccggagttggcggctgagactgaaggaactactggcgatcgggagcacccacaaaagtctcgccttttctccccacctcccactccaggcatcacgtgacggctgccgagttggggtgggggtggcgggcggggaaggctgggacggtcgcttcacatccccacccccttcctgtcttcctcttctcccgcctccgcacgttcctgggaaaggggcgccggggggcgggagagaactggtagttttctgagatggggaggttgggggagcggcgaggagggcgcagcaggtgccgtggggacctgccgggtgcggactagggtctgaggactgcgtgcccggctggcccttcgcacataggaaggcagcctccccactccacgtcctctgcgccttccaggactggtcggtaccccagcgactgggtccagcccacacaactgaggctgtcccgctgcgggccgcgggagcctggcgccccgggaggctgacaggaagggcgcgcgttcccgtgcgcctggcaaagttccacgcccgcaggctccgtagggtgtcctgtgcagctgtgccccctcttcctccgcgaaggccttctgtcaagaaccagctcggcgtggccaatctgggtgggggtgtggtggggacactgccttaactgtctcacttgcccgggccgccctcccttctcccgcctgcgcgcaccgctggagggtgcattgacaccgccctggtcgcctagcctaggagaacgccgtcccggggacacctgccgtgaggtcctaccagaaagcaaatcagggtgaggaagagggttgttctcctccattccttgtctcccaaacgccagccggctccattctgctttccccaaagccaccgattattagcacatactcccacgtcctctcctgaaaggccatcccagcctcggactcggcctctggctgctccccacacccctcaaattcgtcttctttccgcaaagtccaagtgacccaccttgcggactcccggggatgccccggtgctatcttcgccttccttcccgagccttgcagcaggtggtgcgggagaccgcttgcccgccggagtgcgttggtgcccccgcccccaatccgcacattcccatcccctttccgcacatccttagggagcatccatttccgtggaaatcgcctcctaagctttagctcctcttcacccttttctcccccggccacttctgggggcagctctctcacgccgggacgctgatcatttatttctgcatcctcccagcagagctggtctgtaaaggggcttaaatgactttctttgtaattcctctgcagagatcgttccatatctgcctcaggctccttctctccctccctccctccctctcccccttctttcatttctatttggttaacccctcggggagactgaaatgctttgaccattactcacctgtctgcagactctgatcttacaattggctaaattactatctctggagcaaaagggccaatttatttattccttctgggaacccattgtaagagcacgtgtgagtcatgattcaagtaactgactgggccaaaaggtccttgagcaagttattttctgttttcagagggtgcaaatgtgatataacttttattcagaaaggaaacaaaaagattttttaaagtctgaaagacaaggacattttacataattttcatttaagataaaataaaacaaattgcacaaattaaccaaataacactgatcatacaatactctttaaagaaacaattatgtgctaaagtagccatatagatcctaaaaatatttctattgggcctagtttacaagctcctgtacataagtaattataaatagttcacatctagaaaaaatacacataacctttaaaatagaatttatccttacatataaacagtctttgtagaaaaaaaaggatattaaaaagaattcttcgtagcaccattaattttatttttaaaagtgaacattgcaaatagaaatttgttttcatttttagagtgcccagattttaataaaaagagcaagaagataaaaatcaaataatattcaggatcatagagaagcactaagtaaaagacaatctaaagaaatgtctggaaggaaaaactggtattgggaatagaattcggtcatttctgatacaatgtcacactcccaatcagtgtccacacttcaggacccttttcatttttcagcagaagcagaatgacacttattactatcacctgaatctctggcaacgaatctgaaattacactaaaatgaacatttccatcaaattgagatttgtgagatggagatgaggaggaaccctccgattttttggcaggccctgttgtaggtttacagagtgtacccacaaacaatttgaggaccaggacaacgaacttcacaaaaacttcagttgggattttaaaaaatatatattatcatcaacttctaagacttagtacattatttcaagagcatggcactgattccatttattgctgtctttttttgctacaaatataatttctcttccaaaaaatttacaacttctgtacaaatattcaaaaaaagtgcaaaattaaggattctgtatcatagatgtgtttacgcttaatcctcttgaaacacaataaatggagtctatctttattgccctgtcagagaaataagctctggtgggttgcctgctgtgaatttgacaaggaaggctctggtactgcaatagtttattgttatctctatcaagcggtgcaccccccaccccccacccatcatttcttaagcgctccagtcccagctcactaagggaagagatgtcctttatacatcatttgaaccttgactggcacaggaagagaagctatcatataaagaatcactcaaagattccaagttgtctaccccaggcctatctgaactactcaaagatgtctcttcatttttttctttttcttccttctgtccttcaaccttgttcagagagttcttctctttttctaataaaatcacagtattgctgttaaatttattgaatgactctagggaaattttcgataatctattctcgggatcgtcttttgtttcttcaagttgtctcaatttctgcaataaaaagaagaaaatattagaaacatatttctttggaaaatcaagttatcctatctaatattcaattattgtctgtataaagtacagtttaaagggacagagaaaacctacaagtctttaataatcttctagtataattagatgtaataataaagccaattttagggataaatcaggactttaatcattttactgagataaataggtcccaatttgcaaattaagtgccacttaatttcattttaaatggatccatttgaaatttgttcaggtaaagtgccttatttttcttcatcaaagtttcaaactcctctctttccttgctaagtattagctgtactttttctaaatatgagtaggtattgaatttcagccagaagttatggtaatatgtttttttctaataaaaaaaagacataaaaatcccctaacttgccatttttgaatacatgttaagcttgttagaagcattgccattttagtattttgtccctttataggacttaagatatttgaaagagatctccaggtttttgggtgtagatcccagaaggcccaagggcttaaaaattaaagcggcaggtgaacagctgagtaacccctctgctccagaaggtctagtaataccagtttatactgggatattactgttattaataccctgtatgatgtataaagcactgcaccaaattcaataattatcataggtaaaccctgtaaacatgaatatattcggttgctcagttggctcctaagggctaaggtgaggacagagggaggcacacttgcgaaaaacaatgagaaaaacagacatgtaaaagtgtctacaatatttctcatcttcttttcctctttccagcagaaattccatccaaacacaggaaagaagcaggcccgggggcttggagatgatagtaagtgttaccatttattaagcatccactaggtaaaagacacttaacagattctatcagctttttcacaaacctacaaggtaaacgaccccattttaaagagaaggtatgcaaggctcagagtgacagagatatttgcccaaggttgcccagcaagtggcagagaacaggatttgaatttctgtctggctgccttccatgctcttgttctttccattaaaccatgttcttaggtaataaaggacacaatgtcctgttttccattttgttacccaaaaattccacttaaataacttgccaaaccgtctctaacatgtgcagttctgctgtgcaccatgctccccacccccaacattgttatgctggactcaacaaggttgcaatgaggaaactgtcttttgattgggaaaatagatatagccaaagcttatggattctcacatgctaatgtgaagaatggaaagagaagagagagatggaagtggatggcttctgtgttccaagagcagacacgggcagaatttctctgctataggaaatggtataattctatgggaatatttgaaaatcatcctagatctagtgcttatttcattatactactaacgtgcagaaacattactcacagagctaattttcaatcacacacagctaccctgaaaccagaggcgggctaaggaacagactcctagctgattacagaaaagtggctccataattagaaataactccatccaagggcccctttcaacaccatgccaatttgcctacatttaccaaatggatgtaaataaatggcattcaatgcaattttctctttacctggatgtcttctccatttttcttcatttaagaaccacaagtatttttcttgcctatttctcatctatgtggatctcaaattcattcaacacacactcattagagaagctactgcaaggcaggctgaaggctttggtactgaagatacacagctgaataaaattgtgtcctgcagggtgatcattgaggccctgagggcagacaggctgagcttcgatttcagcttggccctttcacgggctgagtgctacaagcatccttcttcaggtgtaaaatggtgataagatacatctttatttcaggactgcaataagtattagaaataaagaactttaaagctctggcagacagtagtgggtgtgcaataaatgtaaggctggattcttattctagaatggtggttctcaaagtgtgttccccagaccaacaacgtcaacaacaccaaggagcttcctggaaatgcaagttcttggatcccacctagacctactacaccagaaactctgagggccagcaatcagtttttaacaagattaccaggtgattctgatacatactgaaatttgagacccactggtctagaagaacatgacccctggagggaagacagacaggtggaaatcataattcgttgtgaaatggtggaatttgggaagagttaattgccattaaaacactcactgtcatcaggttttcaaatgtttcaggcttacagatttgttgcttcagttaattataacaaagacctacactggccagagaggttatagaaatgaaagaagggaccattatttaaaaaaaaaaaaaagcaaacaagaaacatgaacttctcgggtttccttttatttttacagttttgatgaaaagtgactgcagacatattacttgactgtaaaaacaacatccatgcaaaagtgaccatatggaccaactagcattcagtctctaggcagagcagccataaggagtggtgagggctgcagtcagctcaggagtatgtgctggatctaaaggtggtagcagctacttagatctagctatgcagaaatgtgggtgcagatctttcgatttcaaagatgaggagatacatctagatcaatatttgcttatatttaaaattcacttacttttaattcttggctcacatttaaagaaaataacaaaatacccagtatgtataccgaattgcaatctttgcactgtttgagtttctgagctagggatgttgttttatccttttttttttttttttttttttttttttgcagtgtcctacttcacctcatccactcccctatttcccttcccccagctttctttttgaaggcctagtccaatgctacatcatcagtagtttctcagtggagactttgcctaggatcagaagagtcttaactatgagtctgggctcctcaagtggtgctgccagctacgaataaaaacactgaagtggcttacttttctgcctataggagcataccgaacctcaacattgtcttgtcagatctcagatatttttaaaattttgtagttgaataacatttagatttaacatataaggagggattgaggtgaaacaataatgtgttaatgatctatctggcaaatgacaacaaaatagtgcacattagtttgcagcaactatacgtgaaagtgctttgcaaactaatcatggtaataacagttaccatttaacagtgtgtgttctgtacagacactctgctaagcatagtgcatagattatatgtttccatcctcacatgaattctacagggtaggtgccattagtatctccatttataggcaatcaaggcttgaggaaggtaagtaacttgtttaaattcctgtagcagtatgggatggactttggatttagagctaggcagtgtgcctgcagagatgaagctctcaactttcatcttggaaaactactttatgaatattagccaatattatctttaagggaagcatctgaaatagcaattacagaacaaaaacaataatgatagacccggtgaagattagtgtttgatgagaattgtgtaggttccataaaacatcgccaattccttcctgtgttgtgcttcatcagaattatgataaaattaatatactacatttgtcacctataggtggcaacagttgtacagatgactttttggtggatttttttttcaactacacttgggaataaaagtagggctaaacagacaagatgcaaatacattttcaagcttaaataaatagctttgcatgttcttaaaatattttcctgcctttagtgtaaccatggaattattagtgataattcaagcaagaagtgtatagtggcatattctccagaaatctcttgagaattagacctttattaatttaattccttgtagtcaagcagtcattcaatcaaactaatctactatgtgaccagctttgtgcaaacagtcttgtggtcttgattctcagaggaagttttatagaaaagggtgctcttggaatggttttgaagggcaaataggattgaaatacacagtaaggaggagggagggaattccaataaatattcatctattatgcctctattgcaactgtgcaacactgtgtagtctacttcaggaccatgagttgcccagagggtctctccctttggggattctgtagtagacaatcactataaagacagaaattgagacgtgcctaccccaagaggttctaggaaactcaaccagactcatgaaagtatcagcccgtacatgggttataaaaagttttgacttccaaactgcgttctaatctatgactcactttgctcttccatcagcctggaaggtgaggaaggccagagtcagctatactttccacgcgatatttatggaatctgtgattcacacagattcaaatccaagtgaaattagaccttaaaacttagttttctgatttttcacacaaaaattcacagtagttttttttatagttcacaatagtcatgaagtagagatttttgactagaacaatatcctgaataccaaggataaaattggaggagatatggacccttgccataatgaagaggtggaaaatatgtacggtgatacagaaaaactcaagtgataaaccagcaaaaaatatatgcatgatggtatcagcttcaaagagatacatgttatgtgtgtacagccagaaactcctgttcatggtagaggagaacaaatagcaaatttatgaaatagtgcaatcaattattgttctatgataaatgctactctttcattatttcaaatacatttccatcctttgattatgtcttaaaaatattggttagtatatctagtgtcaggaagagatccaatctatttgtgaaattcaaacacagcattgttcctcagctgggcactaacatttataatgaggattggagctcttagcacaagttaatgcaaacaggactttaatcaacataatttcttatttctctattgctatagagattcactgcccatggatcaagaaaatatgtggtaggaaaatagccctatttataaagtgtttttactatgagtcaggtactgggttgaatgcactgcatgaaatacctcatttaatcctgacagcaagcctatgagatagcactattatcatccccattatacaaatgagaaaatgcagatagcgaggtctaaatgttagtccacatatatgtggctaataagttaggcaatcaggatttgagcagaaacagcctgactacaggacttgggatcttaatcactgtgtattaccccaggtttttaaaaaccagcgtgcaactcctggctttgtgctaattagctgtgtaagccctctgacccttagtttctttacattaaaggtttttttgaatcttcccagtctataaagctctgtgactctaaaatattcttaattggatatcttctgggcgtctattattggaatttgaggtggcacaataaccaaccctaacacccccttccctactttagttctcaatgacttaaaaaaataaaagaaaaaggctgacgggaggccaaaagatcagctttactaagagaaagtttgattggagaacaaggtttccatctgtaaagaagtgggtttcctaacactgatcccaagatatagacaagcttagtaattagcagccctgggctgggaaacaagtgtcttcctgtaaaaactacagcatgaaggaacagaacagaaatttgtgcttctgacagtctgattccagagggagactaggaagagcaagaagttcccttcctgaacttgctaggcaagtcagtccctcattccctgggagaagtgaataaggggggcccagagactccaggagggttaccctaggaagctccttccatgtttttctcaaacaaaagaatgtttgagaagaaggtgtccaaggtgtcccctactaccacccaacatctctgattacatatgatgcagattttaactagacagtcatatatggatgaaggccaagaagatgctggaaaattctggtgctgcagggagttagtttgcacagagaagtgtctccatgggcaaagaaataggaagatggtgatccagcaggtgtgaaagatggcagagcttccatttggaagcaaataaatgaagtctaagagacggtctgtttaatcaagggttttgggctgaagctgaacatgtgatttaccccatcccttttctgatgaacaaatcttgagcactgggaagatggattcagggaagagttttatgttatgttcttgttgtgggaatggtgaggaggtattttaagccaaggtctcttagttgaagatttgtgcacatctcaaagtctatgttaagtgctatttgcgaagggcaggccaacctcaagggaaaagatgcaactcaagtcatttctcttttctcagaggcactagttaatcacttccttaatgccgcctcttactgcattcctggtgaagctactttctagatgagacataaaaatagatagaatgacctttggtgatcactagagacccctccacacttttctcaagagttgtgatattaaccctgttaacctggtcaaatttcaacttggatattactttctcccggtgctcggttccctctattacctcaactggacacattactcttgacttgcccttctgaaaaattaaagtgacgcattggtaatagagaaccactctctccctccaaccacactcacggagatgtgatttggcacttgggggcactctgttttcttactggggtcctagagattcttcagtatcctcagggcaaacagattttattaggtgaaagagtaattttcagcagagatgtgcttttatgactatattaactatactgctgtcctttactgtgatcgatggtcctcaatgacctctccttgaacccctaaacccagaggggggaaataaactcactttttgagaaaaagagcaagcaaagagaaggtcagtgggaagcttagggttgttagaaaataatacaccttgtggaaaggaaaaggatgcattttgaagataaacaatggctacaaaggacatttaaacaccagatcaagagtactgaaggaaagagaagtcatttcatcagtgataagaaacatccccatatatggaaaacgggggaaagatgggaggggatgtcccttagtaggaagataaagtagcaggaagaaaaccgcaaatttgcttatggcacagaaaggcatctgggaagaggaaaggcatgtaagttgggataaaattgttataagaaacacatttgtgatttctgcaaactctgatgttagcgtcatcatttccaatgcccatttgaaaatttggattttctgttttccaggggggaacagatccacaaagacaatttaaaacgtaggttgactgcctttaataatgcttccgatttgatgagttgtggtcaatttctccaaaagtaaaatgtgcactattttctgatgatccagaattgggcaaacaagacagctcattgctatcagcctgtgtaaacagcttaactaaatggaacatgtttctcggtgttgttagattcctttttcttctagcacagtaatattaattaaacaatttatgcaggaatgataattgagcagttcctgagatgagaacttctaaatctactcaagtaaggttaagaatttcagctgacaagagttagggcatcaagattttctgcttttcatttatgtataccatatgagtaaaaataaatatacatactactcacttgacttaaaagactgattagcctttttttttttttaactaccctttgcatcgttttatgtcttaaatatgtcttaaagcctgttcagcaagccgggccatggcaggcttaggtgtcactgtgcttgtagcataaaaagtccgtgaacttttgtcagatgaaaatgcagcatttacttatgtattataacatcacagtgctatgttttcattttggagtgatagattttttactgtttgtaaaagaaaaaaataatttttttgtgtggatcaggtgaatataaaaaaagcttatactactatttttcccatggaagttccccttccaaaagaaaatctccaataccattggagatgggtggacatcatagaattatacctgaaattgctaagtttttatgaggtatgcggcgagtgccaaagctagggaaaaacattttatgttattcattaacctatataaataactagatgacctggaattacttccaacagagtttggtaggccatttaggagccacagtgcattatggcacccaatttattaggcactttacaacagccatggaattaaatgggactgcaagctaaggttcatccaggaacatgctgatattggagggtgcaagaatgtttgctccactgatgtgtgattcatttcctactgcaattcatgttttgggtcaagagctggtcagcttttcatttggataaagttatttgacatattgaatcctgacagccaggacaattcagaattggaacaaatttattgatccttattctaaaaagaagaatttttttttggtgggaattgttttaaagattctttcaacgatcaattctgtgtggcactctagtttatggcagcaattgtaggatgctcttaatggtcactacccaggaagcactggggttctagaatggggagacatgctggtggggaggttgccgatgggaatctgcttccgttccagattccatcccttgctctaccacaatgtgacagtgacaatcaccacttcaactctgtacccagattgtaatgaatacttaaatggggagtctgctgttcctgccacatcctttgtttattctttaggtatttaccaagtacctacaatgtaccagaaagtattctagatagtagagatacagtggtgtatgagaaaagtcacatggaatacatgttaaggactttttaatatgaagcaaatatggaacaaagcattagatataccagaaagtgagtccctgaaaattgctttgttgagttagaatcatctacccagtctgctctttggtctaataatggcacctagaacacaaatatcctgtcaaattcagagttatggatgtgcccaccccaaaggtatttttggaataactccctggattttctaaagcttcttttgatcttcttccattttcagtctgtaacatcatttaggcagatatttttcataggttaactagttactatttacactcaactttcttaacctttctgagtctggtgactttctgaaattgacatgtttaaatcagaatttctttctttttactttttttttttttttgagacagagtctcactctgttacccaggctggagtgcagtgatgcgatctcggctcacttcaacctccacctcccagttcatgctattctcctgcctcagtctcccaagtagttgagattacaggcatgcacctccatgcctggctaatttttgtatttttagtagagatggggtttcaccatgttggccaggctggtttcgaatacctgacctcaggccatccacctgcctcagcctcccaaagtgctgggattacaggcgtgaaccaccgcacataaagatagtctatagatggacgaatatgctatccgttctgacatcccgaaaggaccagagggagagggtactgcttgaatagaacctaaaaaaaaattcttccaatctcattagcccaaatggatggaaagaaaaggagggcaggcagattttaggttagcatcaagaaacctcttggattaatggaggtctgactattggttactttggcaacagcaattttctttttgtcaagagcaaagacatgtggattcacctcccatggtcacactggtttggcagctctgagccatctggggctttctcctgcacctctaggtaggcttggtcagcagttgggtgaggcagcagctgccactgctttatggaaatccaggtgcaatagccaatacaataagctcctcatggggcaaaatgttactgaaaagaacaggcccaggatattaccttggttcaaaagtaattgcaccaacctaatagatggtatagacattgtatctacccttttcttaaattctttcttcagccagcaagtgtcacctcacctggtctgagccaagtccaggcaatttgctcaaattcagattcctagctacttcaggcagaggaagtttggtgacccatcttggtgcttccaggtgacaatagaaacatcatgctgatgacattcttagaggcagcaatgagattgactacctgagtgataaacctacaaatattactggatgtatcaaaccaagaaattaaactgtagggagattaaattatagctgtcgtagtacaaaattctagtaccaggtaccacacagatgctatttagtctctctctgccacatgaaatatattcattcagcaacttgaatattgcattataaaaggtattctcttcaactggctttatgccactttatcaagtttaagtcagccatttgctacaataaaaataaacttcatttttgtctcacatgcacaggacaatttaatttttaaattaatgtagaagtgaaaggtgctttgctccaagagaagtatgtctgccctgcatggctgtgtaaacacaatgcgattgctatgagaattaaatatggatcagcaaaatcaatagttaattgtgtaactcagggtctttcatttcagatctaatctgtaaagaaggtccaggggatgtttgcttttgattttcttaaaatattatttaaaacccttctgtcaggcaagaaagttcacagggtctttacattatttccataagttatttggcttgtgagtagtcaaggtcatattgatcgcccagcctttccagctgtccttttaaaattcagtatctttatcagtcaaactgcctcattctgagtatctggcttgcacttaggctaaacaaattttattgcaaaaataacccaacgtaacaggtgtcttggtaccagacatggatggactagttgtattataaactgccttttggtctatgtaataataccattcggagtggctaagcagtccccttcccctacaaagttgacaaaatatactgtgctgtgaaaatgcaagatgttgtgtgacatggcaagaagtactgtagggttgggctgagtctatagatggacgaatatgctatccgttctgacatcccaaaaggaccagagggagagggcactgcttgaatagaagctaaaaaaaagttcttccaatctcattagcccaaatggatgagaagggaaggagggcaggcaggccttctcttgcaaaacgagtagcacagtgactgcggaagactgtgggggtaacaggcggactgccttgacccctgtgatatcacagcagagctaaaaatgtaatgtttgaacttcttttccctttaaagtgtaacctttcatataataagttaagccttgctctctcttacatattgttagaagccttcatccattttggggactgaaggcaaaataattcttgaaataatgaatcatttttctcttaccagcttgtccagaaatcccatgattattttgctatagcagacgatgaccttctcaaaggaagcctatcaaacgctcaagataaataatgagaaggtctctctctcctgcctccaggaaaaaactgcacagaggaaaaatgtttgctaaaccattaatatgttcatcccaggatgggaagcagcttggtctaaaagaaacagagtggcacatgtgtttgtgtgtgaccagtggccccattcaacaggactcctggggcagcatccatggaggggcctcaggagacacacctaagccctttacccagtaacgtcggaaatgaatgtttctctggtggcagacagggtaccttctaaacctcttgactcatgagcaaattaactcaaggtaaggaagcactgggtaatgccgtctctcaacaacctagaaaaaacatggttctgctttactaggccctggaactacaattaatggtaatgaattccctcttccctcacattcccaccttcccaccaggcagcaaatactcaggtggcaaaagaagctttctgtctgtttttctccccatggaagcaaggtttcgcagagtaggtagagagctgcagtagaaattgcaactttcccatgatttaagtgctttggctgccctggagaatggggctgatttctcagggcaaaagtcaactctccatccatttatggctcttgtccaatctatggacagctgaagacacagatcttaactccaggagttggtgtaagatccttcccagcagtgaaatggaaagagttttcaaagacatagggtcctctatgggaagaggtgggagagtcaggaggtgaggaagaaaattttctattccaaggcaagctcaggaatcaatgggctgaaccaagtagtacccaatggctgggtaggggcaagggtaaaaaagcaatctcaaaagtaatcaggattcaaatgatccagggatttgcagataaaattaaaactgctcagcaacacttcaggagaaaaagtcagtagcatgcagatagttatcaagcacattattttgccagccagctgaggatggcagcaagctaaattttgagtccagaaaggtggttagggtttctgtgctctggattgtacatcttcctctctctaacttgttctccccaccttttaggatggccaacaccctcttatcacttgagactcagaagaagggaaatctcctctgaattcttttctgaccaggggccctgatgactgccccttgttgtcccttcatccctgtgtggaccattctcatggcatggtgggtatttactgtgtatatcggttgccatagctcagtctcccttgtagggactgaacctatttatcttcacatctcttgtggccagaacacacctggcatataggtggtccataaatgctagtggaataaaaggaggatgctaattatgtttatttactggtcatccttttcccccctatcactttaactttcacctctctaatgccctttaatgtccttgaaagcgattgaattcctaagacaagctgccatactttctggtggagaatacacatttatttcctgaagggtagttaatgtctaatcacccagaagacatttaggtttcttttatttagaaagcggagataataactcccccagtaagtaaacaggaaaatagactttgttcttcaaaaaaaatttgattaacatagtttcaaggaacatttctactgttgtaaaccaaggttcttgaaataatcaacaacattacagattgcaaggttagagattaaaacatgcaaaataagtggaatcataccatttagcaatggaaagacagactatgtcggtgaggtgttttaaatacccaaacagttttatgacaaaaaaaatcctcactataaacaaaatgaattagggatttgccttggaatgaaggtttaaaaataatgggatgagtttaaagaatactgcaggcccttaaagacgatgagagattttgagaggcctgagtgacttcagtggggtccatccctaaaataatgaaggactaagtaagtcaaaccttagggtcgcctctgcagatctttagcctggcctgtgcaattgtattgcacagaggaatacaatatggcaggaacagaccaatgtaacaggtagcaattgttcacgcaccagatctggcaccagctaccagagggagggtgaaagaggggaaaattatcttttcttcaactctgtgaagacttagagtttcagatagttaaatgtgagtgggctggtgtttcctctttgctagatttagtgtgtgcggtttctctgccatgtatatctatagttctctaaagtgactggagaaatacttttccttaaatcagtggtaaagaagttactggcaaaatgtcccttaaatattcctgttgggtgctaccaaaggattatttaaaatcatgaaaataatccaaaagctgctcccactggaaaatgactaggagaaagatgtttaaattcaaaactgctaagcacggacacctacctaaacacacacacacacacacacacacacacacacacacacacacacccttcctctgaagctttccagggatagctatagaaatttcattttaagcaagggaaaaaaaaatagaatcaccccctcacaaaaatgtttgagtatattttggtctcttggtcagggccaataaagatctcttgttgtgagccaactagaacagaaatggagtgagagatgtactactttatgtggtctgaatgtgattagcgattagcgctggtggcttcagtcacttgggaatggcaatcagggttttgctcctgcaactctgaacgactacaaaacacccttggcttccatcccatatgatgatgggatattaactgaaaatctaattaatctgtgaatgaattatggcctaagaaatataccattttataatcaattttaagcgagtccctaacagaagataagatgaagaaaaagctgtaaaattgtaagaggttggtacattctgttcactatgactgatgattttaagggggataattttacaatccatcacatttttgtcattttaaaaatcatgcctcccaatgaatgttgtaaattaactttagaatttacatatttattaaaaattgtatagaaaacagcaggaactgtgccccatttgaataataaaataacttgttattccactgaagacaaaaacacacaaaaaaatcaaaagattttattttcaggtaataatcatattaattgctatctgaattagttaaaccaagaattaatattcaccagaggcagtgacacagcattaaagataatcctccaaattcccattttcaaacatgtctcagaacatgtaaaagcaagggaaagacaaatggggaggtgaggaccatgttcttagcctgcggggttgggcagcagcagatgtttgaagctgagctacatcacctgggggaaggggaggtgcagacagcaaaacacatgatttggctctgagatgaagaagcacaggacttcattttaaaagcctctttgcttgtgaggctgaggtgggcagatcgtttcagaccaggagttcgagatcaccctgggcaacacggtgagactctatctctacaaaaaatacaaaaattagctgagtgtggtggcaggcacctgtggtcccacctacttgggaggcagaggtgggaggattgatcaagcccaggagattgaggctacagtgagccgtgatggcaccactgtactctagcctgcgtggtggaatgagacaccaactcaaaaaaaaaaaaaaaaaaaagcctctttccaaaaagattctctactctacttctcctactttggttgaactccctacccagaatggaaggtttgctggaggcaacagaacatcccagatgactccagagcatgcagggaaataaccagaagggcatggaaccatgccacataacatgtgggtgaatacaaccattcactctagattaacctcataatggactgtcaactcaaagaactggctccaagataggaactgcatggattcatccacagaaggatgaaggggtcaaggggaatagaactggtgtgttaccacatgtactcactagtaagagtaacccattgggctgaactgacacaagatgttctcttgaaattcctgagagatgagggagaaggataatgcagtacatgtttttcatgaacttcagtttaatcatgattccttctttccatgagggattcatgataggctgttaccactatttttaagaaaagagcagagatccttcatgaagtactgtagttgagtgtgaggcttggctcacactgcctctgctactcagagttcattgcttcagtgcagacatggctaatacctggcacttgtgcggcaaccaactcctctcatgcccacagcaggcattgcttatcagtctctgtcatctgtcatctgtcatcccaagcatggatagggcctcagaatccttcttaacaccacaattcaggcaacctctgtctattgattgtccttggcatttgagatgaaagctatcttgcatccttgtgtgtgtgtgtgtgtatttatacatgggaaatatttatatattatcagcatataattaaatctagctagctatatattacatctatatacagagatccaaatacctatattatatctaactgtctgctaatggtgtagtcatattccttagtatctgcagctaatatgagatatagattgatatcttagtatatgaaaacttgaagtcacctttgactcttctctttgtctcatactccacatctaccagtcttctggtaaattgcctgtttgttctcagaaacagcaagtccttgaataatatccttttgttcaatgttatttttttataacattgatgagaaaaaaaaatcaattcctgccaggccactgtctgtgtggagttggtatgtctccccatgtctgtgtgggttttctccagggacttcaggttcctctcacatcccaaggctatgcgtgagagataaattggtgtgtctacatggtcccagcatcagtgagcataagtgttctgcaaaggaactgtgtcctgtccagggctggttcctgctttgtgtcctaactgctgggatagattccagccacctgcaaccctgagctggaataattgggaaaataatggacttacttgtttttattcacctttcttaagtacgtgtacagttcacatgtgtttcaatgtttaatattagaagtgttctggtctctgtttagaagtttagtaatgtttctgtgaccaggaatatgccctaggaactcagctcttgcttgtatcaattagcctcggataaagttggtttctttatatgttgttttgcctaaagtcacagcttctgagaacctacaactttaagcaaggacttactgtgcattcttctcctttcccctgctccactctgcaccataggaactacattttccaggctccctttatttctggcttctgggaaggttcagccaatgggaagcaatagcagaaggcagaagcctggacagtaagaggagggggggaaacaaggcatttctccccttctctgtgtcctgtgctgttcctagcagcacccacttctccctcactgctctaacttccaccatgtgccccttcccatccatggttttagcttccattggacagtccagcttctagactctaatgtcactctgccatttccctccatccttaaagagggtggtgacttcctgctctgctaatttctagatcatgactgtctcctgttgagtatctcagctattccattatttggataagccgtttactgtattgaattccctctactgaaaggcctaaaatagttcccattccatgctaggccctgaccaatacaatcaggaaattctgtttgtgcaactttaatccagtcattcttcaccatttgttttttgctaccatcagctcttgcctagatgaccacattagtttcccaactgtgcttccactctctcctcctgatagcctgttcttcatacaaaagccaaggcatcccttagaaactgtaaatcaggtcatcccactcccctgttaaaactcctcagatggtttccctttgctgacaatgaatcctaaaattctccccacagcctataaggtccgatataagtggctcctagattcttctccacactatttctcttcctctctgtggttctgctccagccataatggtccagggacacgtcacacatacccctccttcagggcctttgcacttgctatacccgctacctaacatgttcctctttcgattagtcacgtttcagtgtttcacttcattcaaacctgacagagcaagagaatcaccatcttggacaagcaccgccattttaaaatgccccttgatcaaaaaccacctaaatccaaagggcatcagcctaatggctaagatcagcatgaccataaatcacaaatgacatctccgaccagaaacattccaacaataagataaacccctccctgactggagggatgtcagccccaagatagcctctcctccaaccacagacattcccaccctgcaataaacttctccccgccacagaaatattccaagcccgtgataagttctctcaccctgaacccttaaatactattagtctgtaagagagagcactcttgacaaaaattggccagaagcccctgtcaggtttattctccaaaataaacctgtctttgacctttcagctgcttttcatgtttctttcctttctttacctcttacaaaacctctgttcaaatgtcccttcttcagaaaggcctttcccaatcagtcactctgaagccatgccctcattatatcccatctatgaagcctgcttgattttattttattttattttattttattttattttattttattttattttttgagacagagtctcactctattgcccaggctggagtgcagtggcgcaatcttggctcactgcaacctccacctcccaggctcaaatgattctcctgcctcagcctctcaaataggtgggattacaggtgtccaccaccatgcccagttaattttgttgttgttgttgttttttagtagagatggggttttgccatgttggccagtctggtctggaactgctgacctcaggtgatcctcccacctcgcccttccaaaatcctgcttaatttttaaataacataaatcattacttggaattacattacatttttttattatctaccttccatattaaaatataaataccataaaggcagggaccttgtcttttttttttctcaaacttgctccatccacaatacctacaatgttgcctattaaatagtatgaactctataagtagtcttgaatcaatgaataataaatgatgaacctatgtcacactgtgaaaaacaagtggcaccaagaaatagttgtcttattaaaataaaaacgaagatataaacatttctctaattacatcaatactcatgtttaacgtggaaaaccactgcaaaccaaggtactgcttggtagttattacacgagctaagttaataaagttgactgtggccagtgagaaattctccatgatctattctttccacatctctgctatctttctttctcaggcactattccatggtacctatgttcagtgcacttggaactgatgtggtcagggaaccatacagactgtgtctatagccctttagtttgttcattttaatcataaagctagaaaaagatatctgagatattcagggttactggcctaccaactatttcttttggccacaaattacagctggaacagccacttgtttatgaaatatgaaactgagaaattcctaagaactcagtaggccaaagtggatttcttcctgctgaagtcaaaattcattcatttctctatccttccatcttctgcttcttggcttcacgtactctcatgggttgaactaggtcccctaaaaagatacgttgaagttctagctgctgatacctgtgaatgtgactttatttggaaataggttttttagattttattgagatgtaagttaaggtggatcatactggagtaaggtacaccctcaatccaatataactggggtccttatgagaagagaaaaagagacacaggaagacatgcacggaggaaagatgacaggaagagacacagagaagaatgccatgtgaagacagacacagagagaaaacagagacaaagatgagagctgtgcggctgcaaaccaaggaagaccagggattgctggcaatgacagaagctaggaatgcaagcagggccctgccgacacctggatttcagacgtctaggctccagaaatgtgaaagaataccccgaataccccaccccgccttttttttttttttttttttttttgagatggagtcttgctctgtcacccaggctggagtgcaatggtgtgatctcagctcactgcaacctccgcttccccagttcaagcgattctcctgcctcagcctctcgagtagctgggactacaggtgcctgccaccatgcccggctaatttttgtatttttagtagagatggggtttcactatattggccaggctggtctcaaactcctgaccttgtgatccacatgtctctacctcccaaagtgctgggattacatgcatgagccaccgcgcccagcccctttctcttgtgttaagccctctcgtttatggcagctcctgggaaaccagtaaaagcactctctggattacttatcaccattaacaggagctgtttggagacatgaaatttccaggagttgcaaaagtgtatttatgaggtttttaactgatgggaaaaggaagacaagttttaagtgttttatttatttatttatttatttatttatttattttttgaatttcttttctttatttgacttaaaaatgggatgcttgaagatagaaatttttgttcaacactgccatgtgaaataatgattacattaattctctaaaatattaaaagatgcttcatttgaaaaggaaaagtaatcaggaaggaaatgaagatatatttagagtatcaggaagcgatgaaacgcagcatttcatgggaagtctatttggatgcacacatcagcacgcctgctgtgcagtgtgctgcacagctcaccttgtttggtcactctacaaatgacggaaagattgtaattggcattttcttgcaaaggtgtacttggcccaaaacttttagtcccaaggctttctttctttaaaagtaaattcaaaatcaattccctagtaaaatttgaaaatgctggaattaggcccaggattcgattcccagttagaatttctccccacaatatgctaggggaaaacactggtgggatttagatataaatggcttcacttccttcaatcacctaagaatgataaccaaacaaataattgagttactgactcagctggggtgccatctggcataatgaacagtgtatgaccaacgcctcactttgaagcttttcctaaaatgaagtaaaatatgcataggctctttatagagtctctgttgtgtcacaaaagttaggttagtctagcaattttggtaaaggccgagcttagtcgccaccctccagtctccagcatggaccttgtcttaatccacctgggtagcttataaacaagagaaatttatttcccacagttctggaggctggaaagtccaagatcaaggcactggcagttttggtgtctggtgagggcttctggggtcatagatacctgccttctggctatgtcttcacatggtagaaggaaggagtgaatgagctctctggggcctctttcataagaacactaattccattcataagagctccaccctcatgaaataatcacctcccaaggcgccacctccaaataccatcacaatggggatgaggtttcaacatatgaattgtggggggacataaacattcaatcctgaataaagttgtggatccatgtctgtcaaatctatgcttattgtgaaggaagaagtcttttctctaaacggaaaaaaaaagtctgttattttctcggtaaagagtaaaaatcttcagaataaacagcagcatctctgccctggaaggtcggttgagagtggcacctggttccacgatgggaaaagcaatctggggaggctggaaatgtcagagcccatgctgtccttatgggagaagtggctttttgatcttggagcttccttttattctatgtgtgattcctggccatggctgtccccttgtgccccataatccctaaataaatgatagctcctgagaaatcctcagtggaattgcttcttttgcaaggaaatgtgccagtcttaattctactggcttcttactttgacctttggtggataaaggcaggagcgaatccaaaataggaagcgttggtagtttggggccttataatgtaaaattgtgcctgaacttgaaacaggatccaaggatacttttaccgttctgttacctccagctcagccaccatcacccatatttgcatttcccccatctgtccctttcaaccgtttacacatcacacaattttacatcttctctgatgatctattgtttttcatttattttaactctaaaaacctttaagagcatctaatttcagagatgtatacccttctactagctttgttgattatttttcttctgaagattaaatgtgtttcagaatatcacctacactagcagttaactttcatttgagtattttggcttcacccaacacaaggtaataaatcctgggttgttttaaaaaaataacactcagtgaaattaatttggaataaatgtgatggtgcatatacttattttaaagtggcaaatatttatctacagggacacagcctgaccaaaccaaatgcattacctttgtatgcaaaaatgatgccatgatgactccagagaagggcagatttcatggcttctattttgcagtaagcagtacagattgtggttggttgatccattctacagaaaccagtcctcatgagctggagctcacacctacaaaaggtttgctagtatggagatgtttcaatttttgtgagcagttaatgctattattatttttattgaaaactaattggcccttgtggagagagtgattagactactgcttattgaatacttcttatgttcaatcactgataggacctgtgttcaatcactgataggagctgcatctcctgtaaagtccttcatctcctttgaagtccaacgacttcactgaggtagattctcttatgcccattataatggtgagaggttcagccaagttaagaagtttatgtggggatggaagagctttctgattccagagcctgtagtcttttcactcggatcattagcagagagcttaatcatcgtacatgattcactggcttaaatgtagacagattaaaaaagctctcagaatttaaggagagaaaaaaaactcaaaactcaagaagaaattctcctaaactcacagtttacatctttttaaatgaccatggtaaccatccataagtgaggacacactggggaaataaagagagggcaagaccaggtagattccagggtggtgggtggtctaacatcctcatgcttcttattcttcttttttatttgggttgggggaacatggtctcactctgtcacccaggctggagtacagtggtgtgatcacggttcactgcagcctggacttcccgggctcaagcgatcctcccacctcagcctcccaaatagttgggactacaggcatgtgcaccatacccagctaatttttgtatttttttgtagagaagaggttttgccacattccccaggctggtctcaaactcctggcctcaaggaatttgcctaccttggtctctctaagtgctgggattacaggcatgggcactgcgccggccgacatccttatgcttctaacagttatcccttaaagagcagtcaccttggaggagctggtcctcagggcttcctgtcaggacagtgctcccttgatgcatgggggtcagttcacacacccctgataagtgccacttgagtttacatcatacttttatattttgtacatttaaattttatagttgttaactcacaaaccatccaaatcatctttgtcattcttcactactaatagtgctgagctctcaaaggggatgtcatattagattctatttcctcttgttgaaaatctgaaggtttctcaagaaatgaaagtaacttggggaacattaacataaatagaaagaaaaatggcatctttgttttctgttgagcctttgtgacctttctagaggctactgtggatgaacttaaggtcccatctttttttttttttccatgtcctgaaggaagctaagtgtatgtacacgatgacatttttcattttgatatagttggtctgttttccagactatagaaaactgggaaatgaattttctttcaaataaaagttgaaaccctttgggaaagtaaaagaattcaagaaatatagagaaatggctgtttccaagccaacaggaagaagggagagtctttttggttttcaaattagttgttagggaaaacgtttttcttcccatcaaactttcactttttcttctttaaaatagattaatcatagctgtgtaggtttagttttctgcctgcttgttaaaatgtggaaaatatgaacagtggcttcaaacttttatgagtaaattgtcattttgtgccttttattggcccgtatttcaaaccccacattgcaggaactcactgcttacttctgcgctattcactggcaagagtatgctaatgggttatgcagaccatgtctttatgaattgacaataaattccaaaggacaaaacagcttccaaccataattcagtagtataaaactgttctgtcaacaaatctgatggtttttttggtgttcacacattttaggaccccatcatgcacagacacctgctcatttttcctgcttaaaaaagaccaaatttgttctgtcttttttactcttaaaaatcaaaatagcaccatggtgaaattatactacctgctttagtcttcaaaattattctttagagcacaaaaggcagacatactgggcagaccagagagtgaacactggctgtgtcactctggacaagtcattattttttctgaatctcagttttattatatttagtatgggggaatgataaggggtaactgtaaagccatgtgtgatcttaagactagcaccaccagcattgactgggaacttgttagaaatgcaaattgtggccgggagctgtggctcacacctgtaacctcaacactttgggaggccgaggagggcagatcacaaggtcaggagatcaagactatcctggctaacatggtgaaaccctgtctctactaaaaatacaaaaaattagctggatgtggtggcacgtgcctgtagtcccaactactcaggaggctgaggcaggagaatcacttgaacccgggaggcaagggttgcagtgagccaagatcacgccattgcactacagcctgggtaacagagagaaactctgtctcaaaaaacaaacaaacaaacaaacaaaaaaaaaagtgcaaattgtaaggccctacccagatccagtgaaccagaaactctgggttaaggcccagcaatgtatgttgtaacaagccttccaggtaattctgatacacactcaagcttcagaatcatttctgtaaagatttaccacaatatacacaaagggcttgtttgccacattgcagaagcacaagaaatagcagctattctccttttgttattatcatcattgtacagaagaaactgaagcacagaaccaggtgcttcagcaacagcagtgggccttgtcactcagccgagtggtggggacagcctgctcctccactctgcactctctctttatggatgatagtagacagtgatataaatcctgattctaagtgtaaaaggtgtcccacatagcatgttgcctagttctggcatggatgatgcattcaggctttaatgtggagactatagctcttttgacatgatagattttttttaaattatattttaagttctagggtacatgtgcacaatgtgcaggtttgttacacatgtatacatgtgccatgttggtgtgctgcacctgttaactcgtcctttacattaggtatatctcctaatgctatccctccccactcccccctccccacgacaggccctggtgtgtgatgttctccatcctgtgtccaagtgttctcattgttcaattcccacctatgagtgagaacatgcagtgtttggttttctgtccttgcaatagtttgctcaaaatattggtttccagcttcatccatgtccctacaaaggacatgaactcatccttgtttatggctgcatagtattccatggtgtatatgtgccacattttcttaatccagtctatcattgatggacatctgggttggttccaagtctttgctattgtgaatagtgtcgcaataaacatacgtgtgcatgtgtctttatagcagcatgatttataatcctttgggtatatacccagtaatgggatggctgggtcaaatgatatttctagttctagatccctgaggaatcgccacactgacttccacaatggttgaactagcttacagtcccaccaacaatgtaaaagtgttcctatttctccacatcctctccagcacctgttgcttcctgacttgttaatgatcgccattctaactggtgtgagatggtatctcattgtggttttgatttgcatttctctgatggccaatgatgatgagcattttttcatgtgtctgttggctgcataaatgtcttcttttgagaagtgtctgttcatatccttcactcactttttgatggggttgattttttcttgtaaagttgtttaagttctttgtagattctggattagccctttgtcagatgggtagattacaaaaattttctcccattctgtaggttgcctgttcactctgatggtagtttcttttgctgtgccgaagctctttagtttaattagatcccatttgtcaattttggcttttgctgctattgcttttggtgttttagtcatgaagtccttgcccatgcctatgtcctgcatggtattgcctaagttttcttctagggtttttatggttttaggtctaacatttcagtctttaatccaccttgaattaatttttgtataaggtgtaaggaagggatccagtttcagctttctacatatggctagccagttttcccagcaccatttattaaatcgggaatcctttccccatttcttgtttttgtcaggtttgaaatgatagattaatattaacccatctttctcttttgaggacagtactggtgactacattctgtcaataaacatttatggacttcaaaccatgttcaaggcttgatgctgggccaggcaatgagtaagaaatgatctttctcctaaatttctgacatcacaaattttgacattactaatgatctgtttagattcatatgtttttagaagtggaagtcgttttcttaagacaatccatttcaactttcaaattctgcctttcagagagctaaggcagtgggtctctttcctgcatgctggttacaatcccctgggcgggggggggggcttttaagcaatactaatagggatatccatccaagaaattctgatttaatcggtctagaatttagtcggcaataggtctgtgggtaggaagcttttaatataagtaatatacttaacgataaatacaataagtattacatatataaatataatatatacatagttgggatatacttaaactaaaagctattccttgtttatctgatattatagtttaaccaggcagcctatatttttatttgttaaatctggcaacaccgtggaaagattctaaagtctatcctaggctgagaaatcatcttgtagggtttccactgaaataccacaggtaatgagggcgggataagagagcagggtgccatctgggcccattacacacaaagttttatctgttttacttatttggtctctggtctctgtaacatttcacttgaaaaaaatggcttgaaaaagtttgcaaacatctaatctaatcatatcaaaacttaaaacccagagaagatgtctcttagccaggttctcatagctaattaattgcaaaaccaaataccaggtctctttctctttctattacatcagatactgctgctgctgctgctgctgctgctatgtcccttttcctcttgttaagtgatagttcaggaataggaggtgctatgatcctatatctaaaagtgtttggcaaacatttggcaaacccattaagatatgccagacacatataaagagatgctaggtgctgaacatggggattaagatgaggttttagttctcaaggagctgatacaggaaaagaaacacaaatagtgtttctgttcctacaaaaaaataccacttatgtctatgacttgttccctccacaatgtgattattcaaagcacctttctttggtcctcaatttaaaaatggtgaggtgagaggacagcactgggttcccagaggcaaccggatggaacctggaatctaacctagattttcattatgaaagttataggaatgaagaatccataatgacaaaagacacaaggatgactgtactttgggctgtgggatgactcacaatggctatatctgtcaggctttttggcaaatggtctcacatggtctccaattaagtgaaccacatagaatttaaaagttgcagggagtaaaagaacgtgtccttccatttttggggaatacatttactcccatccagattaaaatgggtaagcactaatggtgcttctgtgctatagggaaaaatgaaacataaataggcaatgcatggggtggaggtaagacattctccactgagctcccgtccactgtcactttggaaaggtttgtgatgagcaacatcagaggatggctgctccctggcaccactcttggatgccaatgacccagaaatttaaggggactccagcctcttctcgctcctcagggaccagggaagatattttaggtgatcagttggcttagggaaagaggaagaggaagcaagattaacaagccataaacagatcaacttaaaggggcaagagagctccagagatacagttgtctctggacttggagactggagttcccaacattgagggacttattgtatgtttaattatttctaaactccagtttggacttagaatccaaacagcccccaaggctcacacaatgtggagaaaatggcagtttattcacaccattcacagaataattactcatttctaggtcttggtactttctgtttttcttcatcatttcttcttttctaccaccatcatcactcccaatcaaactatctcctccatgccctgaagtttcatgacttcaggttactgtttggctgtgatttccaaacctcccatcactttctcccaggaacctcggggtaggaatctctgacttgcagagtgatttttaggatttataatctgagtctgttatcatttgaggattaaaaagtatttattggctgggcacagtgactcacacctataataccagcactttggtaggctgatgcagaaggatctcttgagggtagaatttggagaccagcctgggcaatatagtgagaccctgtccctacaaaaaaattttaaaaattagccaggtgtaagggtatgtgcctgcagtcctagctacttgggagactcaggtgggaggatcgcttgagcccaggaatttgagattacagtgagctatgatcatactagtacactctagcctagatgacagagtgagaccctgtctctaaaagattaaaaaatttaaaaagtatttaattattactagatgtccaacaaagttgtgaaaaatttaaaaataaatgacatgctcaaatacatatatatccaaacaaacgctcttcttttcaatattgtcatgttgggacatgtaaaagtattctgacaattcatcttggaaattcttttttggaaattattttcagaatcagttcatgagctttattacttcatgttagattttaattttgactgaaagttgtattattgcctggatttactagatttgcttttgaatgacaccggctgattccaaaagccaaattcatccccagtggatgaagatttgctccctttaagggaacatgaatatcataataaacaatgagtcagattttcctctatggtccattgcgatggctgacgttgaagacttggagttgctgttgttattggtgggagtgcacagaggagagcattgagatggcatgaccaacggactgaattactgactgggtcattcattcattcattcattcaacaaacatttataatgcacttattttgtataagtattgtgataggttgtagagattaccaagataaataaaatgtggaaataagctagatgattaagatcctttctagttattttatttatacatatttcataatgtttgaatccctaatagtattctgggcaaatccagcactgctgacatacatggataaccccctggcccttatttgtacatctaagttctgatgtgccagttaaaaaatgtactgagtttaactgaagtcaccccttagtcacatctgaatgacccctgttgaagccatctcttacccttctcctgcccctgaaacccttcccagtgctcttgaaactcaaggccaattagcagaaaagctacctatatcttcaacctcttttctgaaggtgtctttcaccttgtagttctaactgaaatttgatttcccttggggaagtggctttctttggaaccctttcaagtggtggcttttttcttttctatactttttgtatcactgagcccagaggtgaagtaggtatccgtctttcctacttcctgctccaggaatgaatttcatgtcatctgactgccagactgccacctgcctcccctccttgttataaacatcgattgaactcctggtcattcttcctagctctttgacattttagcttgccacatactatcagactctccaatacaactctagccacaaatcttgatgatttcaatgccaacacaggtgaacacctgagctgtgatctctcttctgcacatctcctctgtgcattcccaccaataacaacagcaactccaagtcctcaacttcagacttctcactctccaaagagcacctcctggtttatctgcttattctctctaatacttaaactcaacagtcctttggaatctaccatccattgagtctaccaatgttttatggttcctcatacctttcgtgtccacatttccattcctactcagtttagtctccatggttcattgtaatcatttccctttaaacacccttaactccactgcccctctctctgtgtaccactaacaaaacctaactgtgtgaagtctaacactctacctgctttacattcatgctattgaacatggatgtagataaatacacaactatgctcactggtctcatttaactcacaattactaacttcaagttgataagatcctgataagtttctctagtccattccctctcctcctttcccagactatttcacactttctcttgcttcttgaaaactgcaatgccttctaacttatacttaactctcagttgacaatcttgctttctgtatctctcaggatagaagaaatcagaagagaattctgacaaggttccatccatgtctaacagcatctgcccataagttgtcctcccctctgctcactctggatagacatcatgtttctatgtaagggaagcccttccactgtttctcatctcttacatcatcagtttttctctctctctctgctggattacttccatcagcatacaatgtgtggtaatttctctcatccttaaaaaaaaccctctccagtgaccccatttatctatacccttttatagcaaaaatctttgaaagatttatatatacttaccatctccaattcctctctttttaccctcccttgatccctctccaatcagactacccctatcattctactaataagtctcctgtcaagatctccaatgactccatattacacgaaaggttaattctcagttcttatgtgacttgacctatcagtgtcatttgatatatttgatctcttctttccccttgaaaactctttcataatcataatctacgtttaaaagtctagtcaggtttaaaatgtaagttgctttgcaaagccccagtggtatcaaattctgaatcatgatgtgttcacctccatgtgggaaatattgggagaaaatgaaaaaaaaataatgaaaaacaaaaaaaggacccaagagcatgcctttaaaatacttgatgcccacattttaacttagggattgtgacagctagaaagaaccttagaattcatctagtccaatactcccattttacaacctaaggacgtcaaggcccagagaagattagtgatttctctatgtttttacagaatggcagaattgggattagaatctaggccttttttccagaggatttcattctaatgtccagtttatactgcttttcctctcatatatgtgtatgtctatatgtatgtgtgtattaataaataataagcatatacatggagacatatatatttgcatatgtacacaatatataaatacaacatacatatatatacacatatacaaatatagttatatacattacacacacacacatacacacatacacacatttttttaaaataatttttttcctgaatgaaataagtgttgggatgagctcatgcactccctctctgtcctttcctctgatagagtcaggtatccctattcggttcccctgggatcaagcccatcttccactaagatggatgatactgaagcaaaaggactaagaaagcccttgacttagcagatcactggctgaataaaaaactcactgctctgggccaccatctcagttctgctgatggaaggaggctggatctgggaaaagagagatttaggtttagtactggctaaatcactgggtgaccttgggtgttctcatctgaacaatgagaggctgtattgtataaagtcttaattcttcccttctaaccttctgccttgagctcaggttatttgggctgatcccatgctgtttatgtcatcttcttctatattagcttctcctccatgtcctatcaccatccagtcactgaacttcttgcctagctaggtgtgtgctatctgcttgtctgttttggccctcttagctgacctccctagatgggatatctggactatgtgatctgtgttttttgccaggctcctttctatgtaattatacttttggtcctggctgttagacagctgcttcccagggtctgatatgacatgaaagaatgaataagtaatgtggaaagcaggtctcacaaatgaggagagggagcttgcacaaaaatgtaaacaaaatactggggaagaaggaaaaacaaaaggaatgaaaaaaagaatggcatattatggcgcttaagcataatactctctgagagtgactccggcctaaaaagaacataagaagctggagatgaagcaagatggatgaatagatgcctccacccattgtcctccccgcaggaacaccgaattgaacaataatccacacaaaaagacatctttgtaagaactaaaaatcaggtgagcaatcacagtccctggtttcaacttcatgtaactgaaagaggcactgaagagggtggaaagacagtcttgaatcaccaacaccactcctccccatcccctggcaggtgcgttgtgtggagaatccacactcttgggagggggaaagtgcagtgactgtgggactcttcactggaactcagtgctgcactgtcacagcggaaagtaacacgaggcagaactcagctggtgcccacagagggagcatttagaccggccttagccagagggaaatcacccatcccagtggtcagaatctgagttcctgcaagccttgtgggctaatgtggtctggggttctatataaacttgaaaggcagtctgggcctcaaggactgcaactcttgggcaagtcctgggactgtgctaggcttggagccagtcgactgtaggggcatgtgagctactgagacaccagctggggtggccaatggagtgcgtacatcaccctcccccaaccccaggaccaatgcctttcactcattcaacaaatgtttgttaggtatctcctgtgtgccaggcactgttctaggcactggtgatgtaagcgtgagcaaaaccaaacaccctgtcttcatgttgtttaaatgtccagaaacgtggcagtgttctacaatagtgaacatgagggtgagcccagaagatcctagaatatggatctctcatagctttgcgagggactgtgtttcttccacttgaggagaggagagggaagagtaaagaagactttgtcttgcaacttagatacctgctcagccacagtaggaacaggcagcaggcagagtcctaaggcccccttgctaggccctagctcccagaaaacatttcaagatatacccgggatgatactgaagggaaccccctgtcttaaaggggctaggaacccagtcctggccagattaatcaccttctgactgaagagcctctgggacctgaaaatgcagcagcagtacccaggcagtacttgccataggccttaggtgagactcaaggatgtactagcttcaggtgtgacccagcacattcccagctgtggtggccatggggagggacatctgcttgagaaaaggagacggaagagtaaaggggactttgtcttgcagcctaagtaacaggttggccacagtggggtagagcaccaaatgggcttttagggtcattgattccaggccttgggtctaaaatgccatttctggacctgccctgggccagaggggagccaactgcgctcgagtcctagccctggcagcattcaccacaagctgactaaagagccagtgggccctgagtgaacacctgtggtagccaggcagtacttgtcatgggcctagggcagtggtggtcatgggaagagactccttggtttgtggaaaggggaggtaagagtgggaaggactctgtctagtagcttgggtgccagctcagccacagtagaagagagcaccaggcagattcctaaggcttctgactccaggccctggctcctggatggcatctctggacctgactgaggatgggggaaactcaccatcctgagggaaaggacacaagcccggctggcttcgccacctgctgaccgtagagcgcttcatgtgtttattaccgatatttgttttctattctttagaatgccttcttacgtctttcccctttttctattatattgttgtcttcgtattagtccatagaagattattatatatacatggtgctaatatttgttggctgtatgtaataccaatgtctttttttgggttgtattttggcttttaattttctctagggtgtccattgatgaatagaagctcctaattttcaaggaatgttaatgctttttgcatctgatttaaggatcctttctcttctcttccctcaggtcaagaaggactttttaaaaagtttattattactgttatataaaaatgcaattaacattattatattgatcttatatccagtcaccttgtaaaactttcctattatttctagtaactgtctacacattcttttgggttttctatgaacatatcataatatctacacccccccaccaaaccaaaagcaagtgaatttaaaaaaaagtttttaaacccaacacaaaaattcttgagccccaaaaataaataaaaaagacagaagatagaaaaacagaaacatcaaaaatgaacaagcttagtgtctttctgaaaagtttaaaagaagaataagataacataagttgaaagaagaggatgataaaaataacaaaagttaataaaatggggtggtggtagaggggcacgatacaataggttcagccaagttaaaagttggtttctggaaaagacaaaattggcaaaccactaggaagtcttaaaaaaagagaaatgataaataatattattaataaaaaggacaaataactacagatacaatagagactaaaacgataagcaaacccaatcaggtggtttatgtcaataaacatgaaaacttagacaaaagggatatattcccatataatttataaaatttatcagaattgatagtgcaataaagcctgagagtattataactagtaatgaaataaactagtaataaactattaataaaagtcactaaccatctgcctacaaacaaaacatcaaaccctgatatattaacaaattttctcacaaattcaagggctaaatcattctaacttatacaacttataaagaactgaaaaatagggaatatttcccattcattttatgagatcagtattattttgacatcaaagtacacgacaaagtacaagaaaataatgtcgctgacacatttcaactcatttattaaaatggttaataaaaaataaaatttgttaataaatcaatatagatacagaaatcttaaatatgacattagctgactaaacggatcattatttacaaaaaatatcatagctatatagggtttatctcaaggatgtaagactggtttaatttttaaaatatataagtatctttcatttaaggcattaaaggcaaaaaccatatgatcatcccaaaagatgcatatgtaacttctgataaaattcaacatgactacgtgattctaaaaaaacccttcttagttaaggaggcttaaagacaacttccacaacctgattaagttaatctaccccaaaacaaaactaaaaacaaaacagttacaacaaacgtcatcatcctgaatggagaaacactggaagtattccctttaaatatcaacaacaatcaagaatgtctatcaccaccaatttaactcaacattgattatagattcttttagaagcacatatccctttcatagaatctcacatacaaaccttcctcttaaaggcaactcttaaaacagatgttcttaaacctaaggcactgtgttctgaaaaggtagaacactcttcccaccccaaagccattatccagtttcttttaaaaaatactgctcagaagcatagcacatttgagcagtcaatttaaagaagcgggggaaaaagggaaagtataatttgacatagttagttgtaaatccaggagtattatccaggctaaatatcatctcaccctgggaccaaggaattaagctcattttgctctttcatcttcaacaaatgcagaacttaaagagctgttttagcccataatttcattcatcttatgatccaactggtattatactgaataacatttgtaatttgactgtattatgtgagtgaactttgcactcccaggagaaccaaagagatattttatggcactgaagtgacaatttttttaaaaaaaagatccgtctttttaacatttgagaaaggtactagaaatattgtttcgcttatgctttgttctgaaaatccagctaagtttcgaatgaagagaatgatttatttcaggaccaatgtctttcactcattcgataaatgtttgttaggtacctcctgcgtgccgggcactgttctaggcactagtgacataagcatgagcaaaaacactctgtcctcatgttgtttaaatgtccagaaatatggtagtgttctacaatagtaaatatgagggtgaacccaggaaatcctagaatatggatcccctatccatcccatgtgctttccctttctctccaaaagctttccattactgtcttgaaggtaaaagaaaaatgtctgggttgattgccttccaggctttggtcactgcatcacaccagagctacacctcactgagcctttcttgggaaatttatttataataataacatagccagcatcaaaagggcacctttcaaaaaggcatgtggcatatgctgtctgattaaaatcctgcaattaggtattatcgtcatttggtgggtgagaatccgaggcacagaaaggctcagtgatccaacattatagaaattaattcaagtttctttgactccaaaacctttttgaacattttctagtatatctggttgcctcattcattcattcaccttctcatcaaatactgagttacgtatcaaaggaattctgaatttcatgttattcttctgagtatgagtatagtctttatccataatccataaatatcctattttccccagctgtgtaatactgtgcaacccagacagaccctccttttccctccctcaccacagagaatggtatagaaaaactcaattaggccaaataaggataggataaggggcactcctccttcccttcctccctccctgcctcccttccttccttctccattgagcttacattccactagggggatggtagacaggataaattctaagctcttttccaacataaaggctctagcttattagaaatggggagaataagcagaaataaagaggcaagtattttggtgttgtggttgtatagcgaaggctgcaggacagactcaggtttacaaatctaggcttgttcatcacctgtgctctgggctgctcctctactcacctctcaaattcactggcacacacagatcacacccactgccagttggtaccacatttgtattatcaattaccctcacagaactgtatgacctctgttctgctaaccagctgtagggaaacactggcagtcagaggatgtcaccactctcttctcaccctctcttcattccctgatttgctcacttgcccctcagagaaatcctcttcccctttatgcccacccaaacctgattcttcaagactcacctcaagcccccttcaggaagatactttggctacctcataccttttgcttagaactatgttgggattcaggcctggcggggtggctcactcctgtaatcccagcactttgggaggccaaggggggcggatcatgaggtcaggagattgggaccatcctggctaacacagtgaaaccccgtctttactaaaaatacaaaaaaattagccgggtgtagaggcgggcacctgtagtcccagctactcaggaggctgaggcaggagaatggcgtgaacccggaaggcggagcttgcagtgagcagagattgtgccactgcactccagcctgggcaacagagtgagattctgtctcaaaaaaagaaaggaaaaaaaaagaactatgttgggattcaatctcagcagtcacagtccattcattcacccagcatttcagtagggattcagtaagcacttaccatgtgccaaggattcagtatgaaacaccatgatctctggtgttaagggataagcagcagagaacaagagcaatttgatggtcagggtgaaaccaaggtgttatgggatcacagaggaggggcacacacccagatccagatcaacagtacaactgctgggaattgattccatagatatccacagaagacaagttaagtgaatgatggtacagccacacaatgtagctggaacaaagaacaagggagacagtgcactgacatggaatgatctccaggatatattaagtgggagaaagcaaaacaaaacaagatgcaggatagtgtacacagtgtgctcccttttgcgtaagaaatgtgcattttttgctttgttcaatgaaagactggaaagatgaacaaaaaaaaaaatcaataaaaatggttacctatatggggctagggacacagagatggaggagagaattctatgttcaaaacgacaaagtcaaattttgaaaatgatatctgagaaaaactttgagaagctctccacgtagcagagactgctgaatactgaagcatgaagactcacttcctagtcactacagcatttgttcacagagtgacaaaacatcaagcctggcagtatctggaggaagatatctcttcccaaagaagggagggaagacatgtgctgaagatcaccaagtaagttatggtccaagaagacacatgccttctccaagatgggtatttaggtccttccacacatctcaaagatttcatgggacactgtggtgcaatgaatgctgttggcatagcttccaggttttgcctaaaatatattgatcctgtggccttgccttctgaataatcctaataaaactcaggaagacaccaggagatatccgggaaagaaacattacagaataaaaagggacaaagtgacatattacatcataagacagaaagggccaaacaaaaaaaaaaagagctcttattttaaggtgaaaaagttgagagtagaagaagaaacattctgtatgatgcttgtggggggttcataaatagagaagcaagctgactggggaaagctggaaaccaaccactaacctctctgcctgcacaagatccagagccagcttggccaatggaagggatgctatctccttttctaattaaattccttaaagagtgtgttgatttattcatttataataaaatcctgttctaattaaaattgaaacttctccccacctgatccagcctcaccatatttctggtttccatgtaattgaatttgaaaacaatgatgctgagtgatagcttgggatattgctgcttattgtgaaagtaaataataaaaaaggagaatgctgctaggcttgttttgggaaggcttaatcagtcctttctcccttagactgaattttaaccacagttgaagataatatgatatttcccttaatgaaattgtatatccgtggctaatttatgagggaagtttacctttctggggctttagcttcacattattttagtcaatagtttttaaggtccctgggttcccctctctccctctgacatcctcaaccttcaattccagaaattgttctgcgtatcagtccatttaatacataatactcagatttattagaattcttcagattggaagctttgccacatctaatgtcatatctgaaacacccatgagaaagaggcaaggtgggcattatgtggttgatgcgactaatgctcagaaaggctgacatgatttatctaggatcaaaaagtcacttaatggccaggcacagtggctcatgcctgtaatcccagcactttgggaagccgaggctggcggatcacctgaggttgggagtttgagaccagcctgaccaacatggagaaaccccatctctactaaaaatacaaaattagccgggcatggtggcgcatgcctctaatcccagctgggaggctgaggcaggagaatcgcttgaacccgggaggcagaggttgcagtgagccgagatcatgccactgcactccagtctgggtgacagagtgagaatccatctcaaaaaaaaaaaaaaaaaatcagttaatgacacagccagcgctgaaacccaggtatgtaagctcccagttatgggcatttctaacatacccagccaaagggctcatggctttgggtttctaggttcttggaggttcacagaggagcccactgtgtaattcgctgagtaatacttgacatttgtcctggtttttcccaagctcatctccttggttgtatagtaagtgtatatctctaggtttctgattagttaaggaggagcagttgggatgcaagaaggtttgaaatggtctctctcttgatccttaaaagtcagagaaaaagcaattagaatatatctgttcttcttcccccgatacctgaaaagactgcaccttgctttttcctcttgcacatgataatagttacttctacaaagattcttcctgaataccgagccctttcttttccccacctaccccacttcttcaagaaagttccttctactgaccccagtattttcattctgcagatgattgttaatcttccgtgtctggtgtaaccattcagttggaagagttctggcaaggggctctttctaaatgtctctatgtgctttcgagccaaatataaaactctaaggtctccaaggaaacccaaacacctgttgactacattttttttctccatttttttcatctaattgcaatttacctacttcactagagcaacgtgaggattaactgtccttgggtaactttcaagtctgtaaaggatttctgcctcctcagggcacatgttctctaagagagacagagccgaaatactaataagagacttaatgtgtagcagcctcgaataatctgtgctctgtgttaccacttcagacagtcagtgtctccctaacacagtctgacaaagacaccgtggagggatcaacagccaagtctgaaagtcccagacaggagcatggacttccctttcaaagcccttgggaggaagtgatattaaccaccaaattaggtagctggaccagggcctggtgcacctgctgggcaggcgggggtgtctgcctgctgtcatattttggcacaaacatttgacagcttctccctcccaatgaacatttctaatacccaaaggttaatcttttcttggcttcttcttgtcactactgacattttgtacccattatctccctgtggttgggggctgtcctgtgcattgtaaggtgtttagcctcatcccttgactctgcacagcagattagtatccccttccctctctgagctgtgacaattcaaaatgtctccagacatttgctgaatgtcacctgggggatggagaggcacaattgcactggtgagacgatccattttaaatgcctgatgtattactcagattatgagtaaacctctacaaaaaagccatcctcaaacatgctcatggggctgcagaaatgtcagttgtcttggaaaccactcttctcccatcccctagcaagttagatttaattctgctcccccaacatgaagtggaggagacacacaaattttcacaagtgaagcagcatctgatttggtgtttatttatttagcaccattgcctagttccgttgcctagttttctttcagccctggcggccaaagcctgctaatttgcacagcattaagtatcctttgctcccctcacctattccacttcaaccaaggatttgtcttttgctttgaaattccactgtgcaagctcctttttaaaagtgttgggctgcaacacatttgaacttgaggggggtaacactgggggttcggtggtaatgggagggaatgtccatcaaagggtgacaaactctggggggcatctcttccctcaaaatgtctcattagggtccccaggcttggtctccatctctgctgtagcctgcagtccaatttaattgagcaacggccttgctacggcacactgctctttcgacaggagggtaaactcattctgtccatcatgacatttgctttcttaagggcctcccaatatgcaacttaaataattaaatgcaagtcacatcacagcctcccttttcaagcctgtctgagggcacagtgggttctttctgatagttagcttttgaccatgtgatttttagaagctggctgggttttttgtttgttttgttattgtttatgacacttctcctcactaaaacccccaaaactcagcatagtgcacacccaatgtgcatagctaaaagggctgtggattttctgatgttggatgaatagtgactaagagaaatttgagacccctggttctggcaagggtctcagagcagcctgcttgtcatggtcagtacttttcatttgtcatccaggaaagtgtaatgctgggagacaaatcccttgtgtcccactgcgcatgtccatccacttcgagctgggatgggcctgttaaaaataaagcaaacctttaaaatgatctaaaaagagagaagttccaggaaggactaaagataactcttacctgtagtgtccactttaaacaatagatttctctggggcaacttggagtgattataacgagtttggatttcgttgaacccaatgctgattttgcatattacagagatttgtcatctttaagtaatgtgccagatgaatgctttaaaatagatgcaactttgtgtgaattttctataatatagcaagatctgattgctctattaatagccaaagtccttggccttgagaaggcaggatggcagcgtttttaaaattcatcatctctgcataattagttatgaatctctaaatatccaagctgaggaattaaccaggaactagagctgttatccctcagcgtcccttttaatattgttccatagtcatcatttccttgtgtttttctaattactgcaaaaccaattgtttttaactcaacttccctggctctttgtaatttgttgaatgtaatcaccttcaagtgaagaaaatgcacttcttgtttgggaaattggggcttgatcagctgagtatcatcaagcggctgggggacgccagtgccaaagctttgcatattttacctgaccattgcattttgagggtatgaggctggagagggcatgctggaaactgagccctttgttgtggtgatctatagaccctactgggattttatttggagatgtacataattttataaaaaccaaaaagaactaggaattctggttccttactctgagtggccaacaatacggcactaggcactagaaaacaatggttttgggtactggattaccttctctctcagacttgtttcagtctgtatgtctgattataagcacctagggcagggctgtgccattgaaccttccctactccttagtgtctagcagtgacctggacacagtagaagctgaacaaaccaaataaactagtgtagaagtcaagtctctctcttgctttcactctttcccaatcttctatcctctagcactagaatgtgctacccatctactacccagttctacttgaagatcctcaaagaacagatattggaagagcgaaagttttcaacctttacttctctctttcataacgggtgtgatgcacactcatcagttaagagtggttctctgtgacagtaattcccaatttgggacagagactatgagaatcaagccaggaggcacgggactatttagacaaagcaaaacaaaacaaaacaaaaggattctgatatgcctgcaacagcctccatgaagtttcatcattgaagagtaaactaaaagtctatatccttgagaaaaaattggacaaatggattcatcatttttctctagcagtgtcctcaaagaagaagaaaggtccttattgtatttctccctgcaggtagccatgctgggtctttctttctctggacaaggaaatgtatgcataaggggctacacaagaccatagtcaatgcagtgagatggctgcatttttatttgacacacatttattaaatacctaggatatgccatgtcccctgctaagttcagagcatgaatgaccagcaattttggcactaatgagggagttgaatgtgcaaacaaacaggtaaaatatcaagtggaaatgaaagagatacagggtcttacaggggaacagacaaggagtagtaactggactttgggcgtggctgatgaaggggcatcctgaagacttcctgctgggggtaaagtctgaactgaaccttaaagatgaagcaggggttaaatgaaaggttagagaagaagggtgttagtacaaaagccattccagggaggccagaccatataagcaaaagcatggaagcctccaacagcattgtgtgttcaggacatgcataaacaaggtataaagtacaagccaggaaatgaaaaaaagtgaagctggagaagcaagaccgaggtgggctttgtgagccttgtaagaggaggtgattggatttaaaaaaaaaattttaagtaaaacaaaatttaaaatgtgtcatttaaaatattttaaactttattttgtgcaagaaatattattttaacagcaaaaggacaactgggacctctccttgctcttgaagttgttttcaaaaccactctactgaggtataattgacagacaaaaagctgaacatatttaacgtgtaccttggtgattttggagagatacatgtacctaggagagtggactgtgtgggtgatggacaaccctcgaaaagttcccagcaaaggaacagcatgacaggctttggcatttcagggagggcacttcggtggcagtgaggatgatgcatttaaggggcacgagactggcagcaaattgacagggtctagggacaaagggaggcagcaggctgcgtgagtcagatgggggccaaggccgaggcagtgctggggtgagtgggacagaggcagacctgaaaagcctctaagaggggaggcagcatgccttgggatggccagagcatggacgatgagagcgggagagtccagggcgactccttgcttcatagtttgtactcctacaaggatggcgagacattcagtgaagacagagaacctgggaggcagagcagatttctagaggaaaaaagagaggtttccatttggatgtttcctcttggggtgtctggcagggctggtgattggtgacacacagccaggtagatgaaacagaagcttgggagagctggatttactagaattgttattttactttttaccagcaaggtccattgggtccaggtgagactcccctttctcccttcatccggagattgggaccacactaggtcttccccacttcctacaactggcttgctcgctccttcacctttacactgttgtcccccgcacatgccttctctgaggacttgcctgctggaaaagggcaggaatgtttgtcatgcccaacttggcaaattagagtgggtagctctgtgaacaaaaccacaacattacttctgtctactacttcacccactgggccacctatccagctcctaaatcctgctccccccactgactctgctaacaactagactttctaaacatttttcagagtgaagctaaagaaatcaaccttgaaagaaaagtcgtgtatttatttcagtgtgttatgaacccagaggcagggttttagaaagtagacttctttggccacattcagtgtgttgcaaacaaagcaagtgggcccccaaaaccagggaatgtggggccacagcccactctgttttgaagggtgggttccaagtcatgctgtgaccagcagggtgagcagctagggaaggagccagggccaatgggagtgggtggtgggagggcacaggagacaggcagcagcctctgtaagcttcctagaagctatggaggaccgactgccactatcaaatgtcctctcctgcctaagggaaattccagggaaccggcccggcacagtggctcaccctgtaatcccagcactttgggaggccaaggcaggaggatcacctaaggtcacgagttcgagaccagcctggccaacataatgaaactccatctctaccaaaaaaatacaaaaattagctgagtgtggtgggaggcacctgtaatctcagctactcaggaggctgaagcaggagaactgcttgaacccaggaggtggaagttgcagtgagccaagatcgtgccactgcactccatccagcctaggtacacagtgagactccatctcaaaaaaaaaaaaaatgctgtgcacagtagctcatgcctgtattcccagcactttgggaggctgaggtgggcagatcacgaggtcaggagttcaagaccagcctagccaatatggtgaaaccccgtctctactaaaaatacaaaaattagccagacgtggcggtgggtgcctgtaatcccagctactcgggaggctgaggcaggagaatcgcttcaacccaagagacggaggttgcaatgagctgagatcatgccactgcactccagcctgggtgacagaacaagactccgtcttggaaaacaaaagaaaagaaaaaaagaaatttcagggaaccaaggagaaagggtgtgtttgaaaagggcagctatcttggcaaacatccaataaggcttcacgatctattggtgaattccatcctgcaggttggggacctctattaagagccttgttatttcaaaagggactccaggggtgggacggccaatctccttttcacaggcacgtgcgacgaaagcaaggaaacactgactcacggggaataaaatctccaccagacactcaaggcacgtcctcctgttattgtctttctcctgtttctattttctttttatacaacctttgccaacatttagaaagttaatggtgctgcatccatcctttaatgccccttcctagggttattggaagccagcacacacccacagccatgccagctgtctgcatagaacattttcccttcctggcagcattgccacagctggggctgacctgtggctgtcagggtgtgcgaggacagatctctggcaacacatcctcttttaaaggcaggtcgcagacaccttggtggagggaaagactgtcttgctgtttgtgctgcttctaggacctcaccaccttctcccaagaagctaaagcaatagaataaaatagagatgttccttttcaaagaggggtttgctctggttggaggaaataggatgagcaaagtgagttgacagagaaaaatattcaggctgggactcacttcattttgcagaaggatttaaaaacaacttcaagcagtaaatttactgttcatcatgaggtcatccaaagccacaacctaatgcggattcttgattgccttgcgcaactcatgtagacaggcatatgatgctgaaacatgggccctaaggtaagtgccctcatacccaggtactctctcatgtggagtcagtgaatttgttttaaatcttgtctcctttttcaggacacttagaccatcctccccctccattcctacttctcctgtctacactggaaccccactggcagaggaaggggtaggacagaactgaagattgcttgccactttttagtaacaagcaacagacagaatcatgagtctcctccttgacataccttcctcacttggcttctaagacgccatgctccccagccctcctcttccttcacagggtcttcctcttctctgtgactgagataaggcaggaggacctagtcttctcttgggctacactccctcccttcctcatcacatttggacacacagcttcaaatgcggttgatgtgctgatgacactcaaatttacatgagccccagactctcctagcctcccacctacccaccacttccacttgcaggcttaatgggcccccaaatctagcatgtccacgcagaactcccatttcacttggcagaaggcaagggcaaatccagcctttctaagagccaaagcttggagtcatccttgaccctacgttttttccagtataccagtgaattgtattatgttttttgttgttgttgtttttgttttgagacggcgtcttgctgtgtcacccaggctgtactgcagtggtgcaaccatggctcactgtagcctcaaattccagggctcaagcaagcctcccaccttcctctcccgagtagctggaaccacaggtatgtgccaccacatccactacacctgtcttatttaaaaaaaaaatttgtaaagacaggttctcactatgttgcccatgctggtctccaactcctggcctcaagttattctcttgccttaccgtcccgaagtgctgggattacaggcatgagccaccatgcctggcctgagccaggtggtatttttttttttttttttttttttgagacagagtcttgctctgtcgtccaggctggagtgcagtggcatgatctcggctcactgcaacctccacctcccaggttcatgccattctcctgcctcagagtagctgagactacaggcctcccaagtagctgggactacaggcgcctgtcaccacgccaggctaatttttgtatttttagtagagacggggtttcaccgtgttagcctggttggtctcgaactcctgaccttgtgatctacccggctcggcctcccaaagtgctgggattacaggcgtgagccaccgcgcccggccattaggtggtatttttaattagatttggaatccgactgttctcactccctgtgttgtacgagccacatgtgactatatttacattaaaattaattaaaatttcaaataaaagagaaaagaaggaatggcccaaatgagaactcttaggaaaactggagcacaaattaaattttaaaaattcagtctcttacttgcactggctgcgtttcaggtgcttaacagccatgtgtacagacatagagcatttccatcgttgagggaggtcacttagccagtgctggtcactgtgtggagtgcaaccaccctggtccaagctatcaacatctcttgcctggatgcctgtaacagtctcttagttgatcctgcttcttcagttttctcaatacagcagccagacgcatcctttttaaactttgcacgtcatgccactcctgggctttaagtcatccaaattccctctcagaggagtggttagtcctcagaaaggcatacagggttctagggttctggccccttctcatttggcctcatccatcaggttgctctctctgcagcaacatgcgagcctcctgctactcctgggctccagagcttgctctgcctcaagtctaccacattggccattccctctactgggagtgcccttcctggctcactcactctcctgcttcagctctctctgctcaaaagtcgctttcttggtgaggctccttctgactattccacttcaatttcaacttctcctccaactgccagcactctcactctccccttctctgcctgactttgtcttttctgtagcactcatctcccatgaacgaactatatacatttacttgtttatgatatctattgtttactatctggaagggatctttgtccatttactcactgctggaaaactggctcagaggaagctttcaacaaatacttactcaataatgaatggagaacgttcgagagctgaaaggggccctggaaaccattcttgggtgtgtggctgagggttggtgaggtgaggctattccctgaggactcacaatgagctcaagggaacagcatggattaggagccggcatcatcctaggcatcttcattgggcgagctccatgacaatgaactccccttccccttcatctatcacagtcagagggacaccaatgaaccacaaagagccaacagggacaacaaccaactaaaacatcaggggtattcaccattttcttcttggtaaaccttcgcatgattcaaccaccaatcctacctctctgataacttataagaagcaagggacaaagtggtgattcagattaatgagctcttcttacatgctactctaaccctccctcccccaacgcaaataccaagattctctgaaaactggaaatacacatggctactagattatgttttttccctaaacatatcaaacttgttttaaaaaaataaaattatggtttcattacatagtttataaattagtattttagaaaaaagttgattagtaggaaaagaatagctttccattgcatcattacaatatttctgacaatccagaatgaattagaagaaaagcagagcccagatcacattttgtgttagggatttgtctgttctcttgtatctgaaaggaagtaccatctgaatagacatagttttaaatgtctagagataatgacttttctactgccaattctggctcaaagacaaagatggtgagggagcttcaacctcacaaacagacctgttcataatggcacagctaacaggtccagggctacacagcatgacgttagcagagagcctggaaaactccatccacagctcactggatgatttaacttgccagagtatataattaagaacagttatctttatagtcattccttcattattgagataactcaattggaggctgttttagacatgctggattcagaaataaaatccttacagactgcactgcaatgtcatgaagattacaccagaaaacaaatggatgtgcatagacaatcttctgtatgtaccagaaaattagatctcaggagagacatgaagaaaaaacataaaatcaaagagggtgggggccgagcacagtgaaaggtataatcagcggcttcccagagagaggaacctgcagggccagcaagttcgctggttgttacctggggcagcgctcttcagtgctttcactaactgtccccttccagctccaaaaccattatctccatagtccaggtcactgtcactattactgccaccgctggcagagtacgtacacattctgggtgccttgtcctaaatgagtaatatgagactgttaagataattcatacaaatcaaaatgaggcagagcatcctgtgaggatgcgacacagttcacatctggctgtcaatgtgtgcacagaattccattcccactgcccagcccgccgctcacccgagagcaactctggtttgccggtttttctgcctcctgaggagctgatgctgtctactcaattaccagagctgcagaaataggcctgcaataatgaagctgtcgacggcactctgccgttgtcccaggctcaggaaggtccccacggttacctggtctgcattttgtacacttctttatagggtcttatttttctcaagtgcctattatgagctgctgttccaaacctaatggcttatttatttaactgatctcatcattgccttccaagtatcagaaggtaataaaacaatcaaccttgggaacaaaagaataaatgtttgcctaatttataattttctttcagctcccaaaaggacagtagcttttagaaaagtaagcaattgctgactccatgtaatcctcaaatctgctgacagttcatgggctgaggagcccagtttcccctcttgctcacatgtacacatcacctgaccccatcccctaaggatgtcactggtgtggcaatgatgctgtattcagaaattgctgaggcggttgacgctgtatgaacagtattcccctctgtgcacataagcagaatactggatccaggagcgcaactcctatgtgttgaatcgaggttatttggggcccttttttctgtttgtagaatgtcctgttagagcctattattcctccctaagccagatagttccaatacagatgcattagatgggtctctgaagtttgtttagaagggtgtcatttggttggggaatgtaaaaacacattttaggatgtaaactcgcttatctggggttataaattcaagcactcatttcctttactctttcattcatttacttagtcacccatccattcaacagtgtttactaagtaactactctgtgctaagcagtatgctaggttttaggggtggagagcttaatactggagataccagtagtctagcaaggactaagtccatgaagaaagacaagtctactgactgtagttctgggtaacgtgtgtccagacctccaaaaggacccagtccagtctggacatgatgaggtacatcctttcatagctccattcaacaaatgctaactgaaccaggcatcgtgccaggtactagaaatataaagctaattcctgcttgaaacgttccctatctggcagtcaacaaagcagggttctgagtttcaaggatttccagtgcatggggctagtgcaggacgatgaggaagggaatcctagagaagtgtgtccattggtggatgtatgtcttatgtgaggagtgcaggtcccctctgggtcagcaagagtaactttttttttcctttttacgttcttggaattattcaaactcctttgccatcaacaccaactgttgttcctgaactggttttctgctctccaattctgtgtgtctgtcatgattttctaaattttacagctctcaattttctcaatttgccagtttcccaatcctcccaaagccagcacagagtcctttggaacagtggcagcaatgctctgtgcaaagtgtgttccatggatcagcagcatcagcatcacctggggatttgttagaaatgtgtacaccttactccgtatatgccaaatcagacacaagtctatgtgggcaacaagattgtagcccttcaggtggttctgatgcctgctccggtttgggaggcactgatctggaggagccctaacattctgtgtttgacttaaggcatggcagaacacagcagtttcctcctttgcctctcagacccacgtcttgtggaggcagccatcccaggtgctgccctggacttcagagggcccagttccagtctcggctctacagcaactttccccgggaccctgaacatggtccagcaggactctagtgttccccactggaaattgaggctgtgggcccagaggatctgctcccctacttgtccatggtccccttccatactgaggcagatgctcaaggttgaaaggtggtttggccacactgagtgagggagacctcagatgtgggtgaatctgggtatctcatcatcatagttgggcagaaactttagtaaaaatagcaaccaaggctcttgataccagacctgggaaagccaagggcagcaaaagtgggaagggccaaggaggggccaggaagttctggaaaatgaaccatgtgtcttcctcctcctttctcaccaccaggcaccagggcagatgctgcagtgggccaccccaggacgagtggtgaaatggcaaataggctgaccatggtcagagtaacctgctggaaacggtaaacaggagggggtaccacataacccccactaggaatgagcaaggagtccctgagccagacacccatagccacccatagccacccatcaggagttccgtgtgtgtcatctcagggcagatgaagaacccactgcaaaaatgaaactcagggctcacggattctagcaagtcatttgaccacaccgagcatctgattagccatccttaaaagcaatagaattagatctgctttccctgtttcataagaacaaagtaaaggttaaaataactactgagatactgaaaaaatagaaaaaacatcattccaatggcgcccacatggcttgggagagtgaatgcttgtcccacaatatctaatcaggggagtgcatccatacccaagaatctgggtgcatttcagaagcactttgatttcttcagaataaaagtgtcccaagaacccacagtattccttaataaggcaggggaaagggtgaaccctagaccttggtttatattcagtaaaccaacagcaaatttcatttaaagtgaaatctatcataaaagtgtttttagggtacactttttagaatcaggaccaacaggtggattgcacccttcacctcccccgacccctcacctgggtcccggtggcagcaacttcactcccccagtctggaagcggctggcttgccattgggtcttcagcatatccgaatgatgagcatgtctgaggccttggctctgcttcattctgcttttgggaactgacttttcctaaatgaggacacgtatgtggaatcacatatcacctttcatcaacattttacaagtttagggaaggaggtgggggagacattcagaaataataaaaaaggtccaaatacagtgaaagctgggcttcctgccactctgtcccactgtagtctgtgctgcccaaaacatctgcttaattatgtatacacatctatagaagccccttttcaagaccccgaggcaaactgttcttagactacttttctacaaaatgttgaaagactacaggttaggaagggttcagcaggcaaaccattcaggaaacactaaagttattcttcaaataatgttattcatccaacaacaatcaagtttcttttttggaggacttctcagaggcttcagtgtgccaatgggcattagcgtagtttccgaagagaggatttgaatttgcaggcttcctcaaacatagggaaccccgattttcctaaaatacgtattaaggttattttgaatagtgtggattgggaagctttgcttggagcccttaaacatctctcagggcagtacttttcaagctttaatgtacatatggatcagctgagcttttgttcatgtgcatgctgattcagtaggtatggggtgggctctgagagtctgcagttctgacaagctcccaggtgatgctgatgatgctggcccatggaccacattgagtagcaagggtgtaattagcagagaacaattaaagagagtttccccactacccatgaaagtagattaacctgcatagtgtatgcctttgtcatgccagaatggagaattgctgtcattatcctccaacctcagtgattataagcaagacatgctgtgacagcctctccagagcattttgtttgtgaggggaagctaagaactgtgttttcatcagcactgtgagttttgtatagtgacttccatttttcatatggggataagaaaaataaccaattcaaatgtacacatttgaattggcagtgactgctcaaaaaggagctataatctcattttctttttgttccagctagtcctcattccctaatttttaacatgcataaccgatggacacagaaaagagaagcactggaaagtaggccctgcctctggaccacagatattatgtcaggacaggaaagttcaggatgggtgacaaaaatttcctgcagtgtgttcacctcacactctaccatatactacctttttacaactcttcactgtaatttaattaagatagaacccaaagccaggtgcggtggctcatgactgtaatcccagcactttgggaggccaaggcaggcggatcacctgaggtcaggagttcaagaacagcctggccaacatggcgaaaccccatctctactaaaaatacaaaaaattagccaggtatggtggcacatgactgtaattccagctactcaggaggctgaggcaagagactcagctgaatccaggaagtggaggttgcagagagccaggattgcaccattgcactccagcctgggcgacggagtgagactccatctcaaaacaaaaacaaaaacaaaaaagacagaaccttagatacctggtgcagtggatattagcagcaacatctgaaaaatctccttctgatcccttatgaagcaattcaagacttgcggtttctattcaatttgttataatgacagtgtttaatcacggagtctacagcagccgccgctgaattgaggtcacatatgtgactattcaggcatggagtacacaacctataactaagatttcgcccctgaatctctggaggctgtgtcattaattaacaacacatttatctcaaaaataatatgcattacagtctttaaaaatgtagccttgacttggaatgagcagaagtttgtgacgcaacattcgtggcaatgggtattcctatataaaggaagaactcagccatgggaatagcccaatcacatttattcaaagatttataattaaaagtctccttttctaatttctcagaagcctatagcataatctccacttgcagctcctttctaatcatcaactcatacatgaaagtgttcgatttaaagttttagttcctatatttatgcatgttgtaaaagcaacataagacatacaagttaaaaattatttagtgtcatcctgggctgcaatacacatttttaatcgtgagggaacaatgaaaaactgatgacccttagcccagccctgtctttcatcatgaaatcttgtttcaattgactgccacgaaggatagtacttctcaatgggaagactcactctattctattgcaatcggtgcacgatctactgctgatttatcaaactatgtcttttatagttcaacatataaagatattttaactggataagaatacaccagaacacgtatgtttctggttagaaggcaaacaacattgtagttaaatctatatcttgggctgaaattggtctatattcagagttaagttttataggataaaacctcacaagtgtatgttgcatggcttttttcttaatcagttcatatatccatataccagtatttacatgtctgtttccttatatgtgtgtgtactgcttgatgtaatactatgagtagatattgtcttatacacattgttttgcttgttggtgaaggacatgaaggaattttcacatatctacatttttatcaggcaggtcactgacttactcatctcctggtgaaaagtttcccttttttttgtcagcaaatgtcttattaagggtgggaaattggcattttacctgaggaagctggtttggggaggcggctctgaagaggcctcatccctctggcggtcatgatggggtcggatgtggaatgaacaatggcgctatctgcagggcgctggccgtctgtggaggaaggcacttcacgttcaagggtttgggctctcatggaagaaactgcagaaagggctgactggagaggcaggagaggctcagcgtcctctggggagtctggctggcataggtagcgtcctgtcgagcgatttcccgagtctgggagtggaaaggttccgatcccactgtccaatgttctcatctggcagttggattctgagatagagagacagagagagaagggaatagagaaggctcacataaaaggataaaagaatcatggaaattggggtatgatctggaggaaaggagacacctagaagggtgaatttaagaaaaagaaaaatgtcacaaggacagaaaaccaaacaccgcttgttctcactcataggtgggaattgaacaatgagaacacttggacacagggtggggaacatcacacactggggcctgtcaaggggtggggggagggatagcattaggagatatacctaatgtaaatgtcaagttaaggggtgtagcacaccaacatggcacatgtatacatatgtaacaaacctgcacgttgtgcacatgtaccctagaatttaaagtgtaataaaaaaaaagaaaaatgataagcatttggaaccagtattagtggtgtagtaaatttccagtgaggtgcatgaagtggacctttttgaacctgaaaacatcccccttcatgtaatatgagataagaagaccagcctgttacaagcagcaatagtcgcttgtgcatatatcctggataatcagaaaaggaacagtcattagagaccaaattgtggtcacccttatttcaatctgggaatcatacaacttcaaccaattaggtgaaatttattaactgaaataatgagtaatgagaacacataaattgaagtgacgtcctaacaatggtaattgtgtatctcgtgcatgaatgatcacccattcagcagttgactaaatctctggcctcttaatttgactgtggggacaagtaattcacacgccagaagggtcatcccaaagggtacctttcccatcataacaccacttatcatgtggacttcattcgacccagctgagaagactgcgagccactttctttcactctcactttattcaatgacaaaactcatcaataacgctttggatttcttggcagtcccagggatcccactattctctagaacaaattaagatgatttcaccatgtgtgtgacatagtctgttaattgtgtgtcagctgcaaaacattttatatacggagaaaagtacagtatctgaaaaaattaccacgtcatttctggaatggtggtgtggtttatcaaggccaatgaggcagcttccaagatctggatgtcacccagaaagtctcctgttcatatgataatcctggaaggaaacttcctaggtttcatcttagaagcatcttacaagtctagcactgggtaagcggaacaacttagcactgtgttaggcatggtggggaatgtaatagattacgacataatgtttgtaccaaaagctcaacagctaccacttctttggtgctttaagaacagaggcttgtggtgtgatctccgcctatgactaattgtttcaacccctgtgcaagagctttagcctctcgaggtctaaggttccttttactgctgtgaggattaaagtatgttcatcatttaatccttagaatttagaatggcactaagcacactgtgagacagccaagtaaatgaataaagaatggcaaaatgcacaaagtatttagtatatttattacatattagtagatatctgataggtgaacagcttatccttaagtatcttttctatacaatctcacttcatactaagcaattactatccaaacttcagaatttgcccattcccctaccttcctcctcaaaacctctttgctgagtagcagaagtctgggaatttcctaatactgaggcaaaaataaagggatgggaatgtgtacagagttggcttttctaggctcaaagaggtttggtgcttggtattggaagtactaggaagatgaagtccctactcaagaggcttcaatcttcacagggatatttagtaggaaaatacagatactcttttctccactatggtgtcatttaaccatctcatatgccatgggatgtttggtcatggactccaggatatctgaatcatacagacgcaccaagagaagtgcttttctttcccaggattacaagggttttagcctcattaatttcagggcccccacctggccagctttattctcaaccagacttgcagattattcatgaccttctcttttcattttctcctcaattaagggtatttaattgttatagaatggtgtttttgagaaaggatcatctgtttgcatggggaggcactgccagatgagtcaaagaaaggacactgctattcagacttctgtgtcttttcttaattttagcctacacatacaacacttcagatttacatgtccatgtgttgtaactggggcaattctggaagactgaaatatttcagatttacaggagtaagtagatcttcatcagaaccgactcagtctttgaagatgagaatcaaagattcatgggatgtagcagctgagatgtgtcagaccctatgtaccccaggctgcctgccctaataatttaccccagcatcctcaggaccacctatccctgaatcaaagagggctcagcagggcaggacgttaggggcgctttttcttttgagaagacgcgtcatcaaaagtttggtgcttattacagctattaggagttctgctttctttgtatcatttcttcatcctcacatacctataaggcaagaactattattgccatttagaaatgaggaatcacagctaaaagaggttaagcaacttgtccaaggtcatatgctgtaaatgaaagcctggacttgaatctaggcctaactacaaagacaatgctcttagccaccaagctatactgattccccgcagaagcacaagtaaaccccaaagtgggctctgctcagttcatagccattcaggcagccacgtgagcagaagcctcacagcatggccccatggcttccaggcaaggtgcccagcttttcctctgaaattggtgctggccctggaattctagcttggttcctgggctccccattctgtggctggagtccactgtcaacatgcctggcatctagctggttgtctggtcctttgcaggatgcctatgcaaccatatctatatagttctgagaatcccaaatgcctagcaactcttccttctgccctcttggattgaatccttagacttctcgccaggattttttttagagtttactttgcctcctgatatggtttggatctgcgtccctgctacatctcatgttgaaatgtaatccccagtgttggagctggaggctggtgggaggtgtttgaatcgggggttatatccatcattcatgacttagtgccatccccttagtgacaagtgagttcacatgaaatctggttgtttaaaagtgtgtggcacctcccaccttctctcttgctcctgctcttgcatttgagacacctgctcctccttcaccttccatcatgattggaagcttcctgaggccctcaccagcagctaatgccagcaccatgcttcctatacagcctgcagaaccatgaaccagttacacctcttttcttataaattacctagcgtcaggtatttctttatagcaatgtaacaatggcctaatacacctctagcttggtgataggcagacttccaagggcaatgtttttctggctttgtctccctcttctatgtattataaggcacatagagcacttaatccagtctcctcaaatgatgattcaaaaaccgaagtaagaatcttgacagcctttttcattttggcaataggtgccataaacaaagctcatacacgtttgtctaacctataacacaaagccatcgggtagttgcaggaaataggccagaggaggaatttgggggtagaaaaaatgttgaaggtggtctaagtctggagcctttctgaagacaacaacattttctagcatcagtccccttaaattattttactttcctttcaacacccaatattgttataccagagcctataaaacaggacttttggaattcttgagttctctgattcccagagaattgcatgccctgacattaaactcataaaccattcactattaaggccatttttatttctagaaattacagatgccaaatgtagtgaatgtgaaggattcatttgtaagtacctatgaagtgaggtgtggacagtcaggggctcagacacatgccaagtttccctgcaagaaaatgtcttcagaatacataaacctttggaaatggaagtttatattgaaaatgctgacaccatctttatgtagtttctttaaggcacaattagtttcttgcagttcataaaaatattgtaacccgaattacaagtgttaagatattgtacttctgaagccagttttttttctcagagaattttaagaactcacaaaataatcaaatggttgtagtaggacccaagttcaaaggggcaagcctccctcatcttcaatgagttgatgcagtattgctctcaacaaatgtgagttcacagctgggcgcggtggctcatgcctgtaatcccagcacttggggaggccgaggtgggcgaatcaggatgtcaagagatcgagaccatcctggcccacatggtgaaaccccatctctactaaaaatacaaaaaaaaaaaaatcagttgggcatggtggcatgcacctgtagtcccagctacttgggaggctgaggcaggagaattgcctgaacctgggaggtggaggtggcagtgagccgagatcgcaccactgcactccagcctggtgacagtgagactccgtctcaaaacaaaacaaaacaagaaacaaaatgaaaaacaaaaaaaaccccacaaatgtaagttcacatttctggctgtgagtgtagttgcccacagggccttgctaagaagttcaagggttgggttgttggatgtaccaacgggcttcatccttgcaaggtcaccaattacatctctgattctggtcaaccctctcacctgttcccattgttccatgtgccttctctctgtctctcaaggtattaacaaattctcacagttaccaccaccatcaagacccaggcacctcatgggatgacttaaggcactacttcccagtccttttaaagttgtatcgcacataggaaatatacagttggttgaggaaaacaccagtccccaggacaactggtcaactgagggctgaacaagctccatctcggtacacctggaacccattcagagcagtctacagcagaatggtagagaatctcatagagaatggagtccccattctcttttactgacaccttgaatacattcccttgcatatgtttggtatgcaaggaggagaccttttcagtctcctagaagcaaatacaggactttctacaaggctctccttttgggggaagaatgttaagactgcttggggcagaaatattgtctggcaccagacttcagtaaagaggaaagttactgtgtctcagagggacataagcagccaagatgggtgtggttccttgtgggatggtggcagagaattttgaagaaacatttccactggggattttcaagttgctaccttagggtgtgtggctgaaaatccccactcatctcactaatgagtgttaccctgctgctccctactcccagctgcctccgcttctggccttagtgtcttcatttgcaaattagatcccactatcttcattataggggtgctttgaggactagaaacaaagcatgtgataagcctggcacaatgcttgcaagaggcacactgttataattcagaaaatggcaacagttctcaaaataaatgttattagactgtaagcatcgtgcaggcataactggatttgattcatctcctccattctcccatataagtggctcctgctccatgattgctcttattctacagaatggtaattatacttcccaggcgtctgactctatcaccagtgctcagcatcacacctaacacatagtcagccctcactgatgtggaatgaatgaacaggtgaatgaaaaacaataaacctttagaatggtcttcctcatcgttaatggatgtgaacctcttcttgtgaaatcacaatctgcttcttttttgctctgactttagcaaccaaagcaaacaactgactcccttttctgtagttatttttcacatgaagccagacttcattaatttagatggccacagagataagatcattcagaattcctgaatattttaatgatggatttcttagtactttaaagtccttgggacaagaatggatgaccaagacaaaggacagccaacagtaggctgttctaacatcctcctcagtccctgtgccagtacacagcatcactgggcctgaaggtcccaggtctaggaagctagtgtggcacagtaactctggctctcatcccaaggaattctagatgccaagtggaatgctgccatactgtttaacaccagcatccacagtattgtgagaactaagttcttactaaagagtcacgttcctggggccatttgtagtgaatgaatgagattactcattatatgaacttcttaatgcatttagccagaaaagtgagttgccctcttttaaagcaaatcactctgttaacttcattgactattgccttagtccatgttgcattgctataaatgggtacctaagactgaataacttataaagaaaagagatatatttcataattctgcatgatgctgacatctgctcagcttctggtaaggcctcaggtagcttttactcataatggaaggcaaggggggctggtgtgtgttacatggtgagagaggggggtgagtgccagactcttttaaacaacagctctcgtgtgaaccaatacagtgagatctcacacattacttcaaggagggcaccaagccattcataagggatccactcccatgacccaaacacccccaccaggtcccacttccaacaatgggggtcacaattcaacatgagatttggaggtgacaaatatccaaactatataaactatgcttcttccaaacttgttttataccatattcgttcacatagcaacatcatctttataaatagctgcaaagaaaaaaagttgatttccagcactatttcagttaatataaatttccaagtgagtaggatatgaattagcaatgatctgtggtgtttgggaaatgccactaatttgtttctcagccttttcttctgcagattcaagtgtctccatcttttcttacggatccaatttcacatatctgtaatggtttgaatttgtaacctcaaaactcttggtattattaacgtatctgtcaaaagagattattataggccaggtttaaggaaacctgactttagttctaagttactctgaatattcagataaatgaagtgagaagactatatgcttcagagttggaaagactgagctcaaagacctgcttggctacctgcttgctgtgggacaacaagggctttttagaactattctgacttaaatagtcatagctcattttaaataagcctggcagagtgctcattataaagcagacactcaatatatttctataaccggttgtcagggagaagtgagggcccctgtaggtacataatacatatactatcatggaatccaagggaaaccaaattgtcatttgtgcaggtagtgttacactgcagcatctgggtacactttactcaacaactaccctgcttatttcccaaggagttaccttttggcaatcatttccctgggagtcagttcatcaaaagcattaatgaatgatgaatatgcaccaatgtacttgaggtagctgcaatctgcctcatgtagagaaaacagagagtctgtgtttttgagaaatctatgttggaggcagcaccttaaaaagctttttaaaaagcctatacaaatgatgtctgctgattctcccttgtttacagacttatgacattctcaagtaatagtcccagattactacaccatgattttcagtaacttacagcacatggatcctaaaagcttatacttccttctgtgcaacgatctacccacttacagatccaaacaaattatgctagtaatcacctttttcccctctgcaaccctcattcataaatcccacaaaaatagaaaactttgaaactcaaactttttcactttgaaaacttccacacagccataaaagtttcagccaaacatacaatgaggccccaacataattcagtcagaaagagtgactcatgggtgtttaatattcataccatcttattaattggcatgcattcctataatgcaagtggtcatgtaaataagtctttgtagaaggtctctccaggttcctaaacatctttaagctacatgtggtattggcagcagaaacttaaactacagatgggaaaacagatctctttatttgcacatccttctctttatctgaatggctgaaacaagcttaaaaaaaactaagtctgttgccaaagccacatcaattaaatgttagtgatccattctaagtttaccccatggttttctccaagtagtaaaaagtgattatactggttatttattcacaaccattgggtagcttttggctgtggcattaagatgaccttctggaagggtaaattcactctgatggctttggagttcatgagaatactcagcctctaagttcaaactggattttagcttcctgagatttgaaaaccaagcaggataatataaatgtgctttccaatctcttgtgctgtctttgggataatggaagaccagactttgggagtcttgcatagggaatgagttgcataggggatgaatatttttaaaatgtaggaaattaatatgacaaacaattaaaaaagaaaaaaaaatggaccatgaaattccttagtacaaatgaagaagttatttaaaccaatataaaagaagtggcatctcaggctaagttggtatccagtgactccaatattctttgtctgacagtagcatcatgtaaattactgtggtaggatgtagtttaaggatacaaattggaaatggttagaaatgtattccaaatgcccacacagaccatgcctttatagaagtctttcttgaatttattttcatatacagctgttatagcctctgaaaaaaaactccttcatgtgcttcttcttgtcactaatactgaaatggcctcttctaaagttttgggaatggttattggtctagtattccagaatatgttatgcaattttccaaacacttctagatttttgcaagtttttataattatcgctatactcttgtcactccagactgaaaaatcttgaagtcttcacataactgcttcacgtcttgctatgctaatatgcctctcttgaaaaacaatggctacacttgtacacagtacttactgtgatacgtaagagtgggctaatgtgaccactacagtttaatggccagcatttgtttgacaaggtcatctgacttaggaactcacagttggatcccagactcctaggtcctgttttaagagttatcacttccagttcaaagtccttgtttataagagtaggacacagaactctcccaactcctcacaaagcaatgattaccacttaaccacttctgtatccatacatcaagtcttgtcctccttggtttgacatttttctaactgaaaaaaacaaacttactttaattagcaaaaccttctagagtgccaaataaatgtagaatcacaatggctccagccctgatccttaattgccatttttctaattgaagaaatgccaacttatctatccaccttttcgcactgttatccttgcccattctctaacaaaattactctatgctcaacctttttcccccaatctaattacaatttagctatctgttggtatctccttttaacccacttctgggcttgtgcgtatgcaaggcattttaaacctaaacaaatgctctttacgcattctcctttgttcacagactcattacattcccagatcacatacccaaattagtgagtcatgattttcccttacagaaggtataacatatcaatcctaaaagattatctttgcttctgtacaacaatctactcatgcccataggttcactccatctctagctgtcatgccaaaatgaagtgaaaagttaaacaattatttggtgaatctgatagacacaggtggctattatgggtggttctgtctctttaaatctcttttacttcacatcaggtttggtgaattacatggacaactgcctctattcttaatttcacctgcctggataacatctgccttgataagacacatgagggaagagagtaaagaaaataacttggggtacaatgccgcaggaagagatttaaatcagctttatttgtcaagaaacatataaaaaccaggaagcatggggaaattcagatctatcaatttagcaactgatgaaaattttattaaagatatttacaggagcattggagccagatcaccctattcattattgctctaacttttttaaattaaaaatttgaagttagatactctaagagtataaataattttagcctgcctatattactgtaattacagatatttaatcaaagtcttcagaaagataagaatttaaagttcaaaaatgtttttctccatttgtctccatatttaatcagtattaattactttttcaattatatgcagaaaagaagaaagctcaagacttcacaaccttaagcttttaaaaaatattcattttaacatgttttacttgcttctaaggattttaattattataagataatctattttagctgaatatcaaggatcatttatttttcttttatgtgactgtagttgaaatgttgacgaagggaagactgaagttgagatgagtccatctttccatttcagtggctaccctccattcaccaatatcccatggctgtctctacaggaagataataaaagaagtaatgaaatccaacagaccaggggatatggatatgggtaaaaatatatatagatttttgcttccatccatgaagaattaaattgttacagaaacacatgtgcacatgcacacacacacacacacaattgcagtgttttctgacattgaaagataagcacagaatttgatctctgaatcaaggaaaacaaatgaagtgagccctacagttactccagccaactgcctggagatggtttctagactgaaacatagatggaatacaaacatagcctggaggtaaatataggtgttaaaggggacagatatgaggatcaaggcagctaaaatttgcagggcagatgtatattaaagaatggagaacactagaaatagtaatatatgatctatatatatattttgtttattgtgaggtttctaacatatatagaagtaaaatatataacagcacaaaggatgggagaggttatatgaaaatagcctgtaacatattatgtaaaatagattatgataaagtaacaatgtaataaaattacatttaaatgttaaaccactcactaaaacaggaaaatagagaggtatagctaataagttacaagaggaaataaagcagaatcaataaaaacattcaagtcaaaaaggtagaaaaggaggaaaatagaaagatgagacaatcagaaaataaataattatatggtagatttaaatccaaccatttagataattacataaaattaaaatagtctaaacactccaatgaataggctgagattgtcagattggataaaataaaaattggtatacaaaatatacctatttatatgctgtagataaaacattcattttaaatataaaaaacagataggtgaaaagtgggacagaaaaatatatagcatgcaaactctaataaaaagaaagctagagtcactatgctaatatcagaaaatgtaaactttagaaaggaaatattaccagggatcagaagaaatatgttatagttataacaaggtaaatttatcaagacattataatcctaaatatgtatatctataacaatagaactccaaaattatgaagcagaaaactgacagaacttaaaagagaaaatgtcagatctaaaattaaaatgaaaagtcttctctcagtaattaatacaacaagtagagagactatcacaaggcatagaagatctgaacaatataatttaaaactttgaccaatgtgaattgtgcagcacactctacccatcaagggcagaatgcatattctttttgggtacacatggattaagatagaccatatccttcattataaaagaagtcttagaaaatttaaaatcaccgaagccatggaaaatatgttctctgagcatcagagaattaaaagagaagtcaatagaagaaagatgtctagaaaaatttccaaacatttacaacttatacagtacactactaaatttcctgtgtattaaatggaaaataatattttgaaatgaatgaaaatacaatggaatgcagctaaacagtgccttaacaaaaatgtacagcacaaataagacaggcttaaaataagtgctctgagacttcattttaagaaactagaaaaataagaacatattaaacataaactaagcagaagacataaaaatgagagctgaaattaagaaaattaaaaaaaaaaacaatttaaaaatcaatgaaacaaagagctggttattttacatgactgatccaactgacaaacctccaactagattgaggaaacactgactaaaggagaaaagacaaaaattctcaatattatgaatgaataaggaggcatcactacagatcttccagtgaataacagataatatgtatgtatgaacaaacttaagccaacacattttacaattcagataaaatggaaatattttttgagaaatccaactaccagaactcactcaagaaaaaagataaaccaaatagtcctatatcaatttaggcaattgaatttggaattaaaaatattttcatgaaatattataggcctagatgtcttcactattgaattcttcagaatttataaggatgaaaaaaatgatcatttctttataaactcctttagaaaacaggagaagagcaaacactttccacatcattttataatgaccatattaccttgatatcaaactcaaagacatcatacatagaggaaaaatagagatcaatataactcatgaaaatggatgcaagaatgtttaataattgatttgctattaagcatttttgcataattaagcaaattactcaccaagtggcatttacccaaggaatgtaaaatttgtttagcatttaaaaataaatcaatattaaaagaaaaaccatatgattatctcaaaatacatagaaaaaatcatttaacaaaattcaacatcctttcatgacagacaaaaaaaaaacagacacagcaaactaggaatagaagagaactttctcactctgtacaagtgtaaaagggcatctacagaaaacctacagataacaccatatttgaaaaaaatagactgaatgttcccccactaagactgagagcatgttaagaatgttagctcttaccacttccatttaacattatagtggaggttatagccagtgcaacaaggtaaggaaaagaaataaaaggcatagagattagaaagaataaagtataactgtctttatttgaagacaatataattgtgtatgtagaatactctaagggatctcccaaaacactatgagaactaataagtggtttagcaaggttacatcatacaaggataatttagcaaaatcaattgtattagtatgtattataaataattggtaattaaacaatactatttctaacagcatcaaaatatgaaaaaaacacatcttataaaatggtgaaaccttgtacactaagaagtacaaaacattgtagagataaatttaaagaatactgacataaatggagagatctgccatattcatggatcagaagactcaaaattgttcggatatcaattctcttcaaattgatctacagattcaatgacattttaatcaaaacactatcaggtttttttttaaaaaaagacgttgacacattgattctaaaattatgtgaaaatggaaacattttcataaagtaaaacaaggtcagaggtctgacactgcctgaattctttataaggctacgttcattaagagagtgtggtattgggtaaggatttgcacataggtcagtggaacagaacagacattccggaaatagactcacacatatattttcaattgatttctgacaaagatgacaatgtaatttaacggaagaaagatagtgtttcaacaaaaggtattaaaaacaataaatactcatctgaagaaaagtaaacccttttctcacactgtatataaaaattaacacataaacccaaacacaagatctaataccacaaaacatccagaagaaaatatcggagtatctctgtggccttggattaggcatcaatttcttaaatagagcaagaaaacatgaaccataaaataaaagcatgataaattagatttaatcaaaattaaaaattttgtcttcaaagacacggttaagaaaataaaacgcaagcaacatatacccatcatgcaacacagctataatactcttactgttatatgtccccccaaagacttatacacaaatgtttatagcagctttacacataatagccccaaccggaaactatcaaattgtttatcagccagtggataaacaaattgtggtacattcatacaacaaaatactaatgggcaataaaaacataaacaaactaaaaaaccactgatacaacatggatgaccctcaaaagcattatgcttattaagagaggccaaacccccaatattatgtattttatcattgattccatttacatgaaattctagcaaaggcaaaactacactgatataaagcagaccagtggttccctgggagcagtggtattaggagagggtggggtgtaaaaggcgtgaaggagtattttggggtgatgaaagtgttgtaaatcttgattgtgatagtggttatacaactgtatacatttacaaaaacttactgaactatacacttcaaaaggatgaattttgttatatataaattatacctccatgaacctgcttttaaacattttatactcagcctgccaaaaaaaaaaaacaaaacaaagaaaaccaaaactgaaatcaaacagtgaactctggttgaacacagatgagcaaaggaactgtgctttccccagggtacacgcttgaataatcattagaggcatctgaaagtggtgttggcaagaaagcatcttcaagaatcaccagggaacaagactgatgctattccttaatcccagatctatgcaggtcacaaagggctttgtgaactcctttatcttttcaataatcgtgggaaatagctattattatcttcattttatgggggaggaaagcagaactctgagaagtgaaatggtcacttgaagaagtgccggcctgactctgaagctcaggatcttcttattcatcaacctctttccagtagggtggggatccctggtttccatagctgtgtgccccagacactcctctgcagagagggcatctaaggagcagagcctctgattcaggaccttacaggtagctgatatatgctctgtgcaaatgcatttgaccttcattacacctcacctttctgcagcataacaacatttgttgattatttactactgggcaggtgcttcacttgtattatgtcattatgcaatgtgtaatggacacatttttcctatgaggaaactgaagtttaaggaggtcaataacttgcccgtaggcctatagctataagtaggaaaaccaggatttggattggggcctgtgcaaacctcaaagcttcaggcttgattgctacatggttatagtaccttcttctgtattcagtttaccaagcattctgaatcagtaaggatgctcttggtggaaagtaacatgttaaatggtgaagaatggtattagctcacagtgcagaattagaacaagcttcagggctgccttaatccagggcctccgcctctatttgcctgcagttctcttcactgtgtccctgctatgtatcagttttatcttcaagctgttatcaggaggttttagtagctccatactagtcagccacacactcccatgtctaagggagagagaagttgactctctgtgtgcctttctctatacctccaaccacctgtcccttgaaaattaggcaaataaggtcataaactcattcccagacaaatttgtatctcttggaaaatgctgttcactgactggcccaggcctgaatttctgaaccaatcactggcagggaagattgccatgaccgccttcatcaggcttcactcctggagtggaaatgtctgctacattctttctgagtcattacttcagttgagtttatggcaacactttttctataaatggagtaattatttccattcttcagataaaacaaatgcatagagaacattatctcttagggacatgagcacatatgcagaagccggaattcaaagccaggtcttctaacaccaagtccagagctctttgcgctgctctgcaacaactatacccgtaccctactctccctgtttcaaagaaattccattatgttgctaggatatatttatattctagttccctcctttggtatttatttatttttctaattcaattactactcccttatggactctagtgaaccatttaaaaccaagtcaggatacttttttttttttgagacggattctcactctgtcactcaggctggagtgcaatggcgtgatcttggttcactgcaacctccgtctcctgggttcaagcaattctcctgtctcagcctcccaagtagctgggactacagttgcatgccaccacacccagctaatttttgtatttttagtagagatggggtttcagggtcttgaactcctgacctcaggtgatccacccctacggactcccaaagttgctgggattacaggcatgagccatcatgcccagccgaagtcgagactttttgtcagcacttcctttctaatgaggttttatagctattatttaaaataaatacatagtctgatataatttaaaacctatttggtgtgatatagttttttcttttttttcttcagtttcattttctttcttactttggagacagtgtcttgctctgttgcccaggctggagtgtagtggtactgtatctccactcactacaaccttcacctcccagactcaagccatcctcccacgtcagcctcctcagtagctggggctacaggtgcaagccaccatgcctggctaatttttgtattttttgtagagacaggattttgtcatattgcccaggctggtctcgaactcctgggctcaagccatccacccgccttggcctcccaaagtgctgggattacaggtgctgcacccaaccgaatctcacttcctaaaagaaaatctccagttgaaaaagatggtccttttaaaattatttttccacatttaccatcaacgcactaccaagccgtatccccaggccctttggctcgtcctacctgtattcactctctgtaacagacctaatgagaagaggttctggtctttggtctttgaaagcaagagtgttataaaggtagcatttttttttttacttaaaatacatataagacaaaatacatgggggaaaaaaaaccttcaaatgtctgcttagccacgcaggacagtgtttcaactagagttctgataggaacggaaatggttaactggctggcagatgactgtgacttcagtatctagcagagccctggaggctagtataaaggagtcccttgcactttgggctcactttacatttaaactatgatgccatgagcctcaccaccttttatcctcccaacaatcatgctccgagtaagggaaggcaaaaatcagtatatccagcttacagatacagaaactgacgcaaaggtttgtttagttaataagcggcaaaactataactgaaacttacgtatggttgtttcaggatcatttctgtttagggtgcattatcttgatttctgaaaagctagggaagttgtatgaaagatgtcaaggctcaggagtaagtttagcacctctgaccctgcattttaagtttgaaacatgcaaagttgttgtctttttttgtgttcaggaagcgtaaggaagacttgacagaaaatttgatgagaagatgcaacaatcattttgacataaggccaatatataaaaattcaaaagatggtatcaagaatatgtgttggtatcatcaagggtaactgccataacttggccttccaatagaatgagatcattatatgtcaaataatattgaatgtgcttttgtttctttagaaaatgcgtattttatggagacaagaagaaagagatgaaaaggcattgaagaagcttctcatttttccaaatgtgaagacttgggagtacagtcttgggggtgctcctaaaataaagagctgagttatagcatgggaaaagatcataataggagggtaaccatggtgaggagaaggcatgggagctgaacagaatagtgatgctggaggccacattagaaatatctagtgctaagcatgaacattttgtttgtgagcagagtttctaggaagtagaaaggaaaactacagtgagtaccattgctgaaggtgggattaagcagaaagccagggcagctaagagagcttcaggataaaaggctgaaaatgtctctgcaagctcaagcaagtcacaggacacttagggagcccaagcacacttggaaagaattaaggatagagccaaatgaggaggatgaggcagactgagcaggtctccctgtggggtcctgaggattgcagcagaacagaacatgctagggcttcaaaggtttgtgacagctacatctgcttaaatgtgcaggggaaggagaaacttcactctgaaagacacagctcagcccatttatttgtttcagaagaagtcctcttagcttcttgttatagtctcatgttgaaatttgatccccagtgaaatctgtcttggtgggaggcgtttggatcataggggtggatccctcatgaatagcttggtgccattctcacaggagggagtgggttctcacctttagttcctgagagagatttccctctatcccccaaaagctggttgttaaaaagagcctggcacctcttcctctcttctttcttctcttgccatgtggtgcctgcttccctttgccttccagcatgagtggaggcttcctgaggtctcaacagaagcagacactggcaccatgcttgtacggcctgcagaaccacaagccaaataaacctgttttcttcgataaattacccagcacagcctcaggtattcctttatatccatcacaaatggactgagatacttgtattccatatgcctgcagaactctattccagaagccaagtttattatctatgcttgtaaatataaactcactaatgggtatggtttattgtggagcaatgcacatgcctacagcctgttctcctatttcaaggcctccatcatcctgggacacttcattcaacttagcagggttccattgctggtcccaatatctgtctggattaaaagatccctgtgcaattactgaagtgaaagcaggtccctgcatgtgtctctagggtgttgctttctcaggcaggggttggtgaaaagtggggatttttcacaccgtgcatagtggattgcctttctacctggcagtttcataccaccatccaatacaacttagatgtacaaaggaagacctagtgcaaattcagcacagcagcctgcccactgtggaatctggacacactggttcaagggggaaaagaccatttcatctgagttccctggcagaccagtcttcttgtagaacagggcaatgtgtaaaatgcagtgcattaattgtcatcctctattctgtccagtcagcacaattatctacaagaagagcaactctcactgattttagcaggagcatctgatgcatccctgaagtcatcattttttgcccatagagaaagtttgctctaaaacccaaatttctctaataggtacccataactgcatactgaataaatatgccatttgcaggcatgcaggttttaggggccttgggcccttcccccgtgcacaggcctctggcatctttggttcccttacggtgaggggaacaaacatctctgcagaaggcatactcctctgtgaggaagttcacatcttacagacatcaaaatgagttttgaattcagactcagtctaaaaagtaaaagcattgagctttgttccacatgaactcagagggctaaacggaaaggcttttaataaagcctcttcactagggcccctgtaccactgttttacataaaggatgatgattcaggctggctggtgtctgaatcttggcatctgtagtctctacccaccccctgcccagtttgtagaataagtttattggcttagttttctttggcctggatgaagcaaacatggaaagatgacagcaattcaacttcctctagttgatattctaattatcctgttaaaatctaattatatgccattgcgtaagtcagggttctccagagaaacagaaccaatagaagatgtgtgtataaaataaagaattggctcacatgataccaaagcggacaattcccaagatcttcagggtaagccagcaagctggagacccaggagagccgatttgttattctagtgcaaaggcccagcaagctcaagacccatgaagagctgatgtttcagttcaagcacaaagacaggaaaaagaaatgtcccagttgaaaggtagtcaggcaggaaaaataattccctcttacttgggagaggattagcctttttgttctacttgggccttcaactgattggataaggcccaccacataagaaggcaccatctgatttactcagtttaccaatttaaaagttaatctcatccaaacacacctttatgaaaacacccaggatcatgtttgaccaaatatctgggcacccgatggcccagtcaacatatgaaattaaccatcacagtacttaaggagatagcgtttgtggcacacagcaatgattaaagagccaaaatgaagggagaacattttctaattcaaacacaatttttatacctccttcgaataaacacatgatgaaagatggcttatttaagataaagtcaagaaagccaccttgctactaatcccccacctcaagcttgaagagacattattattacttagaaatgaatctggtgtttcaaaatggctttcccaatatgtttctgatgtaaactcctcaaatcttatggaaatggtctgagaacaattctaaatccatttcccagatgaggcaaaggaggctcagggggtggagagggaaagtagcttgtctagggtcatactctttggaaaacaaatgtgcctgcatttttaagaactcaggagaatgcctttaatgccccctctccccacattcttattatatggtgtaccttccacctgtagaaatgatggacatcctggttgattaaagagttgactcagcagcagggagaaagcaagggttttgagggaatgtttttcaaggggggacttcagcaggtgtgccctcattgaggtagcccatttctagacatttggccctggctctggatcctgggagattccttgatatttgggtggcatgcagggcactgtgggtgacccatccccttccacggggctttactacttgagcatgtccaactgccggcagccatatctctttgcccaaaggtaacagctccagaagcagctcaggaataatcagtgatgggaggtggagatggatacccagctccctcattcctcaggtgagaaaactcttgagactcgcattctatactccagcatttcccacaggctaagctaaagttgtagccaggctgaagacatgtgtctgtggcatgcacagttaaacagggctttgtgacctgctgctgctgtcttgaaattctaacagcttttgagcaagatattctgcattttattttgcaaattatgtatctggtcctggtggtagctggcacgataacatgtttttattggctggtttctcttctctgtctgacttcccctatcgatctttcctgtacttgctgataacttacttgcccttgaatttttgttacagcaagtacttctggaagaccccaaactagactgttgtaaatgtcattataatcctgaataacactgtaaataatcaaacaaagccacctactatttattcaagcaagacaataatgcacatgggttgactagtcacccaaaatagtcatgtttatatcttctgtcattaccatacctcattttaatatccaaggggtttattaggaagtaataaccaactaagcttcccaactcctctgcactgcagaccaaatgctcaggggaatccaacatgcaaatcactccctgaagaagtagggcaataaacagcagcagagttgacatttcaacaatggctctgcatgccatctgttttaaagaaattatttgtctttgccagcatgtcaagaagagtaagttcacataatttgggaactactaaggcacgtaaattcttgattatttacaatgacaggattatctatagacatcaagtctttttggtaatgtccaaagaatgtttttaaaaaacaggccagggaaatatgaactttttgtagagtccaatattgaggcaagatattagagtgattcagtcttcaactaaagtttcagaaaatgatgtaaagaagaattctagttcagaatcagattggataagctcatcaaatggaaagcccatgtattctccatttttatagccctagggttcagcacaatgcctggaatgaagtcaatgcctaataaatatttagtaactgaagtgaacttggtttatggctgtgccttgaggtttgagtaccagaaaatgaaactgactcactcctacctgtggagcagctagcatttttcccattagctccttcttactggctggaacctaactattgggcaaagccccaggccatgaggacaatctgggaggaagaggatgaaggcactgaatgggtagcaagttgaagtgagatattgcatgtgcctggtggttgtggtttaggcacctgtagtaagagggcatcccctgcttgagagttggctggagaaacagaaggtcatcttaggcctttctcatcatgtgtgaggctcatggccaggaacttttaagactaagttcatccatccttaaggcagtctattcgtcaatatgaaccctgttaccaactcatggtgaattacgggcaaggcacaatgcttttttatgccatgacttctgcatcattcagaaagattatatctagctacttttacctcagacaaccctttttaataataactataggccgggcatggtggctcgtgcctgtaatcccagcactttggaaggccaaggcgggcagatcatgaggtcaagagttcaagaccagcctgaccaacatggtgaaaccccgtctcaactaaaaatacaaaaattagctgggcatggtggcgcgcgcctgtaatcccagctactcaggaggctaaggcaggagaatcgcttgaacctgggaggtggagggtgtgcagtgagccgagatcgtgccgctacactccagcctgggtgacagagcgagattctgtctcagaaaaaaaaatgctaaatggcaaaataataataataataataataataataactataataataatgaagatcgatgcttgagttcctgctagcacctggaatggtatcaaacactcagatgcaaaagcacatttaatgctctccataatgctttaactatcattagtagtattatctccatttggcagatgaggaattggggctcaaagaggttcaggaacttgctcagttccttggcaaagggagaactggaggaggcctgtgtgaccatagcacccaggctgtgagactgttgcaggaatcaatgaaaacacactcaaaaatgcaaaacttgaggcaaatacatgctggtaacattaccaacaaggtctaagttctgtccagaaatagctggataagctttgcaaattttctagtgtacttaggtccgatgactgaaacattgtctccccacagagccttaggaaatgggaacttgaaaagggcagacattatgaagttcaggtagtacacctacctccctcaaaaagttgcagaaacttgggccagggaaaagcattagagtgtatctagaataacctctctctgtggttgaggagagttagacacgcagagagacagagatgaagcattttgacagaacccaaaactatgcttttgattcctccctgccccaccaccaacattcattaccatattaccctgtctctccaacagttttaaatctccttagaaaaacctgactcaattaaaacccagaaaataagttcttttaaaaaaaaatttaggttgtataggaaagggactgatttatttaaacatgttttgaagcagaattatagataaatactttgagaccaggaaaacattttgactgggtcaatggtgaggggaaatgacatctttggaaatgcgacacattcatttggaagcagggcggccaatgcccactccaaatatgttcttgtacacttaggattccttccaaatggcctctgaaggtagaactcaggcctgagttttcaaatgggcagaaactcactttaaaatatatttcccctctgtttgggagctgacacaatggagttacaggcagagacggtttatcaccacggcatgaaagtctctcttcaaattcctccagcttttataatcaaacaataacatcgccagagtataggttttagctacataagaaacatattggaaattgattcaatgctcctggcttggctgtaacaatgtttcataacctagtaacctctcagcttgctcttcccccttcctgaaaagctttcagctgcaagaaagtggcaaagcaaagataaagaaaacatcatccttttatctgatcctgtgcaaaatgagtggagcagacactgtaccagcgataagatgattgctaaatgactcttctcacattctatcgatgggctgatgaaagaaattaagactgacattgataagttatttttccagacactaccgttttcaaaaaatgaggatttctctttagaagcagtaagccttggttgcatgtctatgactcattaaaaagtacccagatcagctctaccttgtaacagattaactggaaacatacatagttttcctttccctatatcccattttctatttctctggcacatcctctttgaattcattcaagccaagaacaccctgttctcaagatccctttcctacctacttttctcagtcacacatttcattaaacaactcaattttcatctccacaatttgccacagtcctcacccaatttatcattctagcattttacatctctctcaagctaatgtatttctcaaacatgccagatttaatggacatatcattgggaatccaggtgaaactgtggattaaagaaactggtgactaacaggaattcttgatgttgttttccaggatggcagataaggaaacagcttgttgaaatccccttggcttgctaaatggcaaaacgggctgaaactgtttggaaccaatatagctgactagaatctgcacagaatagacttgcttgctggatgagtgaccttttgacatcatagctggaatttccaccatatgtttcagaccaactccccctgcatttgcacatgtgactcatgaagaggcatgaagagacaactgcatacaccctagggattttacaaacttccccctttcctccaccaaatcactcgccaatcccgaaatcctcctcccaaaatttctcccctcagtatactgcttttaggctggcatgggagatagatttgagttagcctcctgtctcctcattcggttgctttgcagtaaacctttctctgcaagagactggtgctgtgatgttgggctttcctttgtgtgggggcaaatgaaccctatttggtttggtcgcactggtggaatgagtgtgtggatcattttcatggctgcggtttttcattaagtacctgtgactgagttcttacaatagggacagtgacttccaagctagattatagggtttttgtaaatctacaagtcatttgttgccagcctttttaaaaaataaatacatgaatcactgctgcttttcagtcgctgattttttattcccttcaggcataagaaatcctagttttcacagcacctaaaccacagacagttcaacctatctataatgtctagtaaactcggaatcatctgtgggagaacagaggaaaaaagatgagaattcaagggttgcccacaacctctgtttttagctcctcctctgacacctgatatgcttcagaatgataacctgaaactttatagttgtgttagggacatgtccctttctttccctctctctctcctcttggcatctctcttgtgatgccaaagagctgctccaaaggtagacaggaagaggactgggatgggggatgaatggcacagatcagacgagcaaaccaaaggcaggctgatgtggcacatagacgtgttgcgttttgttttggatggtgtttttaacttaaaaaaattacaaaatacacttcaaatacaagaatgcatattatcaaattattaaatttaaatcatcagcataacccatcctaacaactttaaccatgtttttaaattactcatgtgctcctctctgattacatccttcaatcaccactacccgttgataaagtaactatcttgttaatttcatgttattcattaatttgctgtttgttccttcttaccatattgtttagttttgctcactaaacaaatagaatcatcctgtaagtgttctgctacaattggcttttttttttccaatcaacattgcttttcaaatgaatctatcatggtacttgcagctgaagttcattaattttcactgctgtatagtattccatagtataggtatttcaaaatttgtctgtcctttccactgtcaatgaacatttgggttattttctaatttttgctatgatgacaatgttaccacaatcactgtgctatatatttcctgatatacttgttaagggtttttctagggccatgcctttcaaactttttagactactatccacagtaatacattattttttatatcataaaccagtacacctttgtatgtgtaccgatttataaatgtgaccaaaatgtcacaatatttttccttaatacttgtatgacactccaatattttcactgggaaaaaagaaataaaaacaaaacaaaagcaaatgccaaacttaactcccaaatcgatttcatgactcacagatgagtacagttcaaaaagtctttgtttaaaatatatttttttctgttattaatacagctataccaggtttcttttctttaagattgtgtggtatttatttttctgtccttttactttcaattttcctgtgttgatgtttagatttattatatctaaacagctatatagctgcttgataatctttgccttttaactagagattttagtctatgtacatttattacaaatcctctatgttcagatttctaccttttattttatgctttctagttgtccagcttttctgtatttttcttttttttcatgttttcttttggtttgtgtttctcctccttactatttaactttccccctactttttctactagatgggaaattttatattttatttctacccttaaatttgttaacctagaatttttcacatgcaaatataacttaccaaactaatatattaatcattttccttaacaatataaggacattacttgcttaatgcctcttcccactcatttccagttctattattgctcaggatttatttctcctttgacatatttagtaatgtacttttattgttatatagagagtgtttaccactttctctacttaacagttcttgcatttcagatcttcctgagatcattcttctcctgtctgatgtaaactctctagaaattggtttaatgaggatctactggtagaaaatttattattatttttttctagccttggaaaatgtctttgttcttgaagcatagtttcactgagtattcacttctaggccaataattattttgtctcagatacaaattatatcttcaagcacactgaagatataattctaatgttttctggttttcattgttttcagaaagaagttcactgacattttaattgtcagcccttactaggtaatctgtattatattctatattggataattctcagttctgcagtctttggaggactcattctgtgtattattgcttttttctgactctcactaatgagtcattttttccccctcatggtttcattgagtttctattgtgagttaattttacctggaacttcatttgtaagtaaagtttagagtgagtgccttgagagaggatttgagatgggttctgccagattccaaggagtactgttaacctgagtctgcattgttttttaacttttcattatggaaaatgtcaaatgtactcaaacagtgtaatatatcctcatatacctattgcccaaatcttagaaaatactaaccttctgccattcttattacatcagttccctctttcagtttcttctctggagtattagaaacacaactgggacccttttgtaatttgaagctgggggatttatgggacacaaaaagagtgaattaggtccctgagccacatgagtgcaaactaatgattcacaatcttcagaggaaacattttcctcctcttttttccccctcttttttccccagctattgttaagacagcgttaaggctgagtcaggaatttattcccaaaatcttcctctacaggtcagctttgaagttactgccctttggagtccagctttatgccggggaggggcttgtgagtctttgatctaacatttcaccctagtcaggcccttggctttcattatgtcaacaatttagctccttaaaaccaggttctgggtagggtgaatggtggggatttgaggaacgttaaagaacatggtttacaaagtctgaagagtttcccaggatatgagacttccggtgttgaaaccaagaaagtcccagcacactgggaccactggtcaccctagctccaggccactagagactagcgcatgccccatgggcaaatgctggctagggcattctcttgctcctatggattctggctttcttgctgttcctagcctgtgatgaattctttgcctgcagctcagccatacctttaagaaaatacgtataattttatattatatcctatactttagtagatgtggcattctgtgagaggattttgaaattctaatttggcatattgccagataaaagaaagtccctgaagattcattcttttgaactgagcccacatttaaacatatatcatatgtcacataagaaatctaggattttggcttctggtgaaaaatgggaagacttgctacatagggctagcattcttctatgctgacaactggagctgcttccctagaacaggtcatgttccctatatacctcaaatccccatcatcactcatgtaatatatgcatgtacatgtcaagcccagcctgcaccactcattgacctgggagctttttttgagtttgtaactcctggccaagcatctacaaaagggacccttggactctggtgcctgagaggtgatccaagaaacatctggtcatcatttagaattcttggggggttatttaactttatttcacagctacagagtatagtcttggtttggatgatgattccactccatcctcgtcacgctgctgagcaaggcagtagctttgagaacatccatttcctcatcttcaaatagcgaccatcacacttaacttgcagggctgatgtgaggacaaaacaaggcaacttacataaaacacccaggccagtgcccagcatatagagagctcttaataaggagtagatagtaatgtaatatgcatgattgtcttactttattcataattttctgtcacattggacagctttcaggtttttgcgctgaggcatactgctatctgactttgttttgaccctcacctactccttactatgccataagttacaaacacaggcttatacttactttaagtgacttaactgccttttgggaagttgaaggaactgcacaaaatcgggtctctgtatagctagttcagtttccccaactttgtactttagagcaataggccttggaaatgggtggggaaagggcaaaacttacttaatatgtctcactgttgcctgttcagtggggcctttccccttcaggtacctgggttaattcacgccacctcgtagggctgcaggtctgcctctggctctggcagctcagcttcccgatctgtagcacattactcttctctttcttaaacatcaaatccttccttctaccacttctcagttccatggcaagaaaagataccagccccatggctcattcttttagggtctgggggtactaatctgagaaacacacggctgctatcagccagtgatgctcactgtgtgcctttccggagatcacctgtatcataacaaaccactggggactttcactcaaaggaattgccagtgggtgggaaattcagacatattctggtaggctggtatgagagctttttttggtagggagtcctttggcaatccttaaatattcttggttgtctatcctttcatatgaatacatgattctatttatcacagcacaccattgatcagggaagagtgtttcatgaggaggaaggtgactggtgcgtttggttggcttaaagataagtgagagaaaatgaagaagtattttactgtaaaagtctaaatatgagcatcatagtgatcaaaagtgacgtcttaacacataggtcttgttttgaaaatctccatagtctatatattgtctgtagggctaagttcaaatatctaagctcggctttcaaggtctctaccatctggtcccatcctacaaatccaactgtatctgcatcttctcctgtgctctagctaaactggtctttgcagactcccctaccctccagtgtgccatgcgccttccaatctctagacctttgctcatgtggtttctcttgacttcaaggacatctttccttttctgatgagattctatcccttaggacactctgctgcacatcagaatcacctgcggatcttcaagaactacaaatgctgggcttccatccccagacactgtcatttaattaatatggggtgtgattttggtatcagtatttttagaggcttcccaggtgattctgatgtactgcaaagtttgggaaacattggactaaatggcaaatgctcttaaacttcactgtattacttacttgcacttgcctttttccgacagacaaaagccaatgctcccagttccactaaagcggggctctgcactctgctctgtgccatcagatgtatatagaacacacgtttctcttatcagtgatcacaatgcatttgaattgtctatttgcttctctgcatccttgctagactggagttcacagagggcagatactatgtcttattcctctttgtatgccccgaagctgatacagggcatagtttgcagacaatgctcgatataggcttgttgaactaaatagaatttagctccctggtgcaatcgataggagtaaacattttacaggagtgaaaaaaatattttacaggagtgaaaaagccatacttttaacactgtaagtccataattctctctctagtgaaaaaacagaggaaaggagtcatagactaggattcagtatgctcataaatacagaaacatccaccaaagctttatttggtgattgtccctgctggtgagaagaaagcactcacaaggagcaagctgacagtaaaaccagagaaccagccaggagggaatgaaaaacatggagggtgatatgtaattttataagcacagggcttgggttgtagtaggcagtcaatgaataaatatgaatattattattttcagtccttggtcagaagatatcacatggtcctgttttcatgggcctaacttcatgacaaacagagtttacatttcaggttgcctttgctggttgcaatctctcccttttgagtttatcacttatagttagttataagtgggtgaactcagtgcagccacagtggacatttccttgcccaagctactaatctacagtacctcttaaatgttattttgtatgtctgaaaatgcagaagtaaaattatcctggcaagtattactacaggatctgaaccatacaaaatcacaccatcctattccccatccaaccataggcatgattatctaagtagtttggtgccagtctgatagtagccaataaaacagtatctatcaaagttattgagaacatttgcacttcccacccacattttgttttgattatcaatagctcttcctgcctacaattaagcctaaatgtgttagcacactattcaaaatgtgacattcgacttaagcagccttccgctcaaaaagctgtgacaatctggtcaactttctaagatacacttttattttaaatatgaatgccatttcttctacattaaatttctaaattttcttcaaatcttcttggtgaggaaattggtaatattcttgaaatgagacagataattatcgggactttaattgattggcagctacagtactagaagacctaatgtcctatttaattttagggaaaagataattctagatgcattgtattccacaaaatatttatttgaacatctacgtagcttgttggtgaccaattacgtatttattcatacatatggtagtggcaaattaatccaagttcaacatattttctcaaaaagttactcaaggttaactgcacatagagcagtgatcgttcaaattatgcaaaataggaactatgcataaatcactgaaatcaattacatcttttctaacaactcttcaaatttgttttcctatggatttctttctttctttttttttttttttttttttgagacggagtttcgctctgtccctaggctggaatgcagtgagtggcatgatctcggcttactgcaatctctgcctccggggttgaagtgattctcctgtctcagcctgccaagtagctgtgactacaggcgcgtggcaccacgcgcagctaatttttgtatttttggtagagatggggtttcatcatgttggccaggatggtctccatctcttgaccttgtgacctgcccgcctcagcacaggcatgagccaccgtgcccggcctttcctatgcatttcttaaatgatagtaagaatttgcatgtgttctcttagcacagatcaactgaagttagaaggagataaccttggtagggggctggctgcaggctgagatgctagatgtccctaatacccattaactccttctttcagagttaagagaacctctattttttgctggacatatggctaccttcctcaaataatgtttcctatcctatgtgaccaagcactggccaatgggatgttagcagaaaggatggggcaactgctaggaagtgttcttaaaacgataagccatgtccttcatcatcctcccactttttggaaagtggacataaggggtggtttttcaacaatcatcctagaccatgaggtaacttcgggaatgaaaatcatgaggaatgtaggctgggcacggtggcttacgcctgtaatcccggcactttgggaggccaaagtgggtggatcacgaggtaaggagatcaaaaccatcctagccaacatggtgaaaccccgtctctactaaaaatataaaaattagctgggcatggtggtgcgtgtctgcaatcccagctactcgggaggctgaggcaggagaattgcttgaaccagggtgttggaggttgcagtgagctgagatcgcaccactaccctccagcctggcgaaacagtgagattctgtctcaaaaaaaaaaaaaaaaaaaaaaaaaaagagaaaatcataaggaatgtaaaccatatgaggcagaaggacaagataggagagtctggcactgctctattagcttggaccacctccctctgggctttcatgtgtgacagcaagaaatttctattcttatttaaaccatggcactttacagtttcttctagtcccatctgaaccttattctactggtagtaatggttagaaaaatccagtcgtggatttaaaaatcaatgtggtttggagaattcagatggttggatccacatatggataactaccactagacatgttctattagggctttgatacaatgaagcaggtcccagagttcctttcattttgataagcacctagatcttgggtcttgttctctatagaagtgaagcacttgattcaagagcctttgagatcttcccctctttcctgaccaaagaaacaaccacagccatcaacattctggcattgggccaggcattctctcctctgctgggtgaagaagctgctctatttgctgactttcatttgactgtggtgtagagattccttgataataacaactgtacatcatatgactattttattctttctgtctctacctaactgcagatgggcacattaccactgtggattagatactttatggttggatgataaacgcttataagaacaacgtctgtgttaccagaatggccattatacatgatgctccaaacctcctctgtttggcttaacatagctttgtctcaattcctagccttaatgcaggctacttttcaaaagtagggttctaccacaaaacaactcttttttccccggcaatgattcttgtgcagttcactgaagtaggcttgatcctgtcttttcttccgcaacccaaatttgctcaaaccagtaccaagtgtcccaaacttatagatcccaagagttcttattcttctttttttctttttttttcttttttgagacagagctttgctcttgttgcccaggctggagtgcaatggtgcaatctcggctcaccgcaacctccgcctcccagattcaagcgactctcctgcctcagcttccagagtacctggaattacaggcatgcaccaccacgcctggctaattttgtatttttagtagagatggggtttctccctgttggtcaggctggtctcgaactcctgaccttaggttatccacccgccttggcctcctagtgctgggattacaggcgtgagccaccgcgcctggcctgagtttttcttaactatgaataaaactttgcctgagttcttgttacaatacaaatatgtggccgaaaaaggtacctgtataatccgtaactacacagatgtgagttggtttaccacattagctagctaaagtctaggagaggataaggaataaagaaatgaaacaccctggaaaaatggaaatatactggtttatggtgttaagttactcaaaggtatttactgagcacctattgtccctctgcatgatacattagctgcagacaggagagccccctccggggaagaatggaggaaggacaatagattggggtggcaggatgctttggaggcagtatcagtttctcaagtagggagaagagcacctcacagacaacttctcagagctatccaaggaaagttagagcatcagggttagaccatgtcctctgtcatgctacagtctggcagtaggaacacttctggctcctgcagaagagactaggagtacacccagacaatgggggagggtaattagctctcattgaaccagggggcactgtggcctatgccctttagactactgggaagatcgttgttttcaactcttttaagttggtggtaaataacatgtatctttcacttcatgaacacctaccacacaatcctaataggattcaattttttgtgtgaatcctattgggttctgcttcaataatattcttccccaaattcctcgaaggacattttctcctctttataagattttacaaatcccctgtttccttgtagggaattaatttttattatcactggctgatgtttccagtacaagacaatgaatggtatttgaattcctactaattgttaactctagtagacaattagtacaatacatagggtaaatgcattatagttagatagcaggaaagaataattagaaatacagcatttgtgatcgttggtgttaatacttctattaagctaggctagccatttgctttgtttagtctgacatttatgggggcaattttaaagaaaaaaatgcagttgctttattttacttaagcatgaatcttcaatttcaatatagagcaggtttagttaataatatcttttttttttttttttttttgagacggagtctcgctctgtcacccaggctggagtgcagtggcgcgatctcggctcaccacaagctccgcctcccaggttcacgccattctcctgcctcagcctcccgagtagctgggactacaggcgcccgccaccacgcccggctaattttttgtatttttagtagagacggggtttcactgtgttagccaggatggtctggatctcctgacctcgtgatctgcctgcctcaacctcccaaagtgctgggattacaggtgtgagccaccacacctggccctttttttttttttttttttttatgaggcagggtcttgctctgtcgcctgggctggagtgcagtggtgtgatcatggcttactgcaccctggacctcctaagctcaagcaattctactgcttcagcatcccgagtagctgggactatagacacatgccaccatgcctgactaattttttaaaaatttttagtggagatgggatctcactatgttgctcaggctggtcttgaactcctgggttcaagcaattctgctgcctcagcctcccaaagtgctgggattacagagatcagccactacgccgggccaagttaacaatgtcttctcttgtaatcaactcataacattttgattaaactaacatgattacccttaaccacagaaatgcaaacattcagattcacaactttcttgattgttctctgtcaaagacattagttaatattggttaaaagaacaatacatttagatttgcacagttgctgttattggaaacatattatggttataaaatattgcaagaatatgtgacaacacttaggttagacaacatgaagaacagtggtattatcagggtgaaaatatatatattctcagccattcttgtggaattaagataaacaaccatttgactttgttgagtctcattcagtcttaaaatggagggactttttagaaggtctgtggagaacctattgactggctagcctgggagacatgctcagtcctcttttcccagctacttcatgcaatggaggctggaaagcaacatgctaactttcccagcatcctttgcagctaggattggctgtatgattcatttctcatcaatgttgcataagatgtagtctatgggggaactctagtgatgtttttagccttccttatacttttgtcttaaaggtaaatgactagagtgctgggagtcaatttgcaaccagaggccacaagcatgaggacaaaaagctagcatggtaatcacggccaagtaaatagatacaatgagccaatattggctcctctatttggcttaacatagctttgtctcaattcttagccttaatgcaggctacttttcaaaagtagggttctaccacaaaacaacctttttgcccctggcaatgattcttgtgcagtttactgaagtaggcttgatcctgtcctttcttctccaacccaaatttgctcaaaccagtattgagtgccccaaacttatagatcccaagagttcttcttaactatggataaaactttgcctgagttcttgttacaatacaaatatgtggccgaaaaaggtacctgtatataaagggcttttgatgacattgttgatctgctacacatctctttcatgtttgccttcctccagtcttttaattctataagatgattttattaataattaatatgaatacaacatatattatatattgtatatattatatattataaattgtatatattataacatatataataatatagtatatatataatatatggtatatatactatatataatattataacataataactttattatttatgtaatggattgtcaggcttttttgttgtcatttacttgtggccagcagtagcttattcatatggttctccaccactttgaagagatacatctgcaatgatctgaacaccaagtcaattatctatcaaaaacatggttcaaatgtacttccattggagtaatctaatgcagcaccatccaacagaacactgatgagggaaacattcataaagaacacatatgtttgtgtgatgaaggaatatatgtgatctatttacgatatagaacatacagtcatgtacaacaaaatgaagtgttggccaatgacgaactgcatacacaatggtgatcccttaagattataatgaagctgaaaaattcctattgcctagtgacgtcgtagttaaaccattgtaatgtcatagtgtaacccactactcatgtgttgtggtgatgctggtgtataaaaagctatgtgcttccagtcagagaaaaatctagcacatataatgatgtatagtacagaatatttgataatgataataagtgactattactagtttatgtatgtactactatactatactttttactgttattttagactgtaccccttccatttaataaaaaaagttaacagcctcagggaaattcttcaggaggtatccagaagaagacactgttatcacaggaaatgacagtcctaggtgtgttattgcttctgaagatcttccagtgggagaagatgtggaagtggaagacagtgatattgatgattctgaccctgcggaggcctagctaatatgtgtgtttgtgtcttcgtttttaacaaaaaatttaaaatgggaaaaaaaatttttaatagaaaaatcttacagaataaggatataaaaattatatttttgtgcagctctacaatgtgtttgttttaagctaagtattatcacaaagtcaaaacgttaaaaattaattgaaaagtttataaagtaaaaaagtgacagtaagctgaagttaatttattattgaagaaattttttccaataaatttagtgtagcctaagtgtacagtgtttatgaattctacagtagtgtaaggtgatgtcctgggccctccattcactcaccactcactaactaacccacccagagcaacctccagttctataagtgccctatacaggtatattgttgtttatctttgatgctaattgttttttttttttgagacagagtctcgctctgtcacccaggctagagtgcattggcatgatctcggctcactgcaatctctgcctcccgggttcacaccgttctcctgcctcagcctcctgagtagctgggactacaggcacccacaaccacgcccggctaatttttttttttttttttttttttttgtatttttagtagagacagggtttcaccgtgttagccagaatggtctcaatctcctgacctcgtgatccacctgccttggcctcccaaagtgctgggattacaggtgtgagccactgcaccaggccgatactcgtattttttttaaccttaccttttctatgtttagctctgggtagatagacaaatacttaccattgtgttttaattgcctgcaatattcagtacagtaacatgctgtacaggctcgtagcctaggaccaacaggctatatcatatagcctaggtatgtagtaggctataccatctaggtttgtgtaagtacactctttgatacttgcacaaccttgaaattgccgaatgacacatttctcaggacatattcctgtcaccaagcaacccatgactgtacagaagacagggccactgaaaattcaaaatgtggctactgttattgaggaagtaaatttttaattttatcttgcttcattaatttaaattgaaacagccaacatgtggctggtggttatggcatcaagcagcacagatacaaagaattgctacctactaaaaaatatttgaagagattcctgtagttctcttaggaaaaattcagcttgtaactttatatatattatttcacaggcccaagaacacctcgttatagaaaaatgatgactcagcagggctttgcacaatgtcatgtttgaaggctgttaaacaatatttaactcgaatattagctaactaggcagaactgataccaatttaagcattttacattgacaactataataaaggatgtccttttggaataataatcttattcagactacactctttcagctgtttgttaagacttttgtgttcccaattacgaatgaaaagaataataatggcatgccagtctcattaagccacgggggtaaaacaactctctcagacaaactataaattatcatttgcacaagaccgctgagtatgctagaaaatcagccacaaagtgtgccaacatggcgccgaatagtgggagactgagagtaggcagctaaagatgctcccagtgaaaggagaggagaaatggatactgattatactggacactggggatctgtggggccgtcatatactggagcatggtattcagtactgtctcctacacccaaatgtgacttgcggaagtgattccatgatgcctcagtgtcttgtgtcgagctaaatagtcagcacactcacattcatggctatatttagagcctgaggaacaaccacttcttcaagtgtccagggtggcctggaggagctaaaggtgccacttcttctatctcttgacaaggaatgcagtcacaggcaagttctccatcactggttacctccaagctgctgtaaagaggtcagcaaagttcctgcgtgctgggaacttgagttccttcaaggttatgtacaattttaagacgtggctgacaagctgaacttatttcagagacaggactatctatattctgagttttaacagaaatgatgtaaaaagagagttgagagttttggcaaaccgtattttcttattctatatttgctactacgtgtaaaacattcaatttataaaatatttcatttaagaaagccaccacctacacttctaaccactaggtgttcttgagataattatagaaactggattactcagtatcactttcatttcatattgacaaatacttctcatcagtttgctttgcattcttttggaaatacctgttttcctcataggtgctgctttgacccacttattttatggtaacgtccaatgtctaaggagataatggcaaccatgtgtgaatagttaacactcagtcttgatagagggacatggtctctaggaatgtaccatatctggaagaaggatacatttagaataagtctccataaaagacatatgaatatgtgaatttttacctatgatgtggctctgaaatacagaatctgcaactgcatcgtcttcatcctcttgcaagttttcatttgcctcttttacctgcaggaagaagaaaatgatgcaagttcttatttgttttattaaaaagatccttttgcaatcctcagagtaatggtacattctataacaaatatgtgggcataggtgtgagtgtttgcatgtatatacatgtgtgagtatgtatgtatacatataaaatacatttttttcgttctacttttccgcactccatcatttggctttattacaagttttaattataagagcttattttcagacatataacctcatttctgaaggagagaatttacagggtatctaattctacacaaaattttagagataacagcttagcttgttaataattaatgaaatcagtaacacagggctgttaggaaacgttaaagtctaacgaggtataattcctccagagtcagtgacttccactgcaagttattttaataggaataaaaatatatactttaaatatacttaggtctgctggctctttcctggaatgtaacttaagaagataattttttttcattctttccataatcaaaggagatgacaatgatgtatgtatgatcagtgaaccagagcagtgagtcatttatctagatatttttttttgagccaaaaacattccctcttatatttcagttggaaggcccaggcactagattgggcagcatcagatggaactctacacagaatttaatgaagttccagtattttacagatgagaattctgaggtctaggaagtctccttaaagttggcacaaatgcagtaagtggcaacactggcatgaaagcccaggccccctacttcccaatccagtagcaggagaagtaatagcatcatcagcaataccaaccacaatagaaacagtgaacacttacatactgggcaggtgctgtttgcacgtaagatctcaaaatccttacaacagtgctatgaagcaggtgctatggttagctttattttagagatgaagacccatcccaaagcaatagagaaggtaattgtcaaaatggtggcactgggatttaaacgcaacaaatctgactccggatttgtgtttactggggggacctttggtattctcaaattttccacttgaatatgcctgtgtagacttggactcagtatcaagacaacttagggttctagaggtaatggcgctacatagctcttttaaaatacattccagacagccacctaggcagccaatgataataacgtgcaatgcaatgggtgtcccgcttaggcacgtacgttagaggttgccagtggatttgctacagggcttgagttgaatgccaagaaattattattttatactgtcaatgtgaaagtcatatggctgaatactgaccttgagctggatttagctttctactttttgcctcctatttttcatacttaatggaataagaccaattatttacattttatgactgcagtttcaatattagaatgtaattggtgcttaatctgtaccatgctgatagccagagatggcaaactcaagagagtatgtaaatggctaactcaacactggcaaggacagatcgttaagcgttcagtatcaagaggccatgcttcatcactttctttccccttcagctgtctaatctgtgggcatttccctgtttgttagcagctccacagaaagaaagtcagagaatgaaagaaagcaggaaaaaagggtttcattaactgaccgtgttctagcagcacatatttacagatggcagggaggaaacacactgtgagtatgagaaagaccaaagtactacttatttgccttccaaggttctctttgctcagggatctgtttgtaacaaggtgacccaaaggcccccaaacacctcagtttccattaataatccactgggagccttttatcctcttttatagaacaacaaggaaatcatattttcagtttcatatcagctcttatggcaatatgtcccatatttcttgcacctgttaatgtaaaatagtatttcctttgggtttttccaaatttatacattttaaactcgcaggggtgccctcgaaacctgttggactgtcagtaaatcatcatctctgctggcctgtgaaattctagatgaaagaatcaaataattagaacaaagttttcatcttacagataaagaaaaaggagcttcagagagggttaataatttattcaaagtcatacagaatttcagttatagaacaggcactcctgattcctattcattgctataattcaatttttcagagtgccctgtcctgttacagctatcctttccagaccttccaaagaactactctttcttagtgtctaccatttagatatgaaggcaatattccaagtatccataaactatattttaagagtagtaaacatttttcatgcatgtgtgtgtgtataattctctgcttcccttccctactgttccttacctgttccgtgccccttctccacctcctttctctaattatcatatttaagaaagaaaacaaaagcgactgcacagtcctacctgtcagctccttgccagaggcattccagggccttatgtgcttaaccgcaaacactaaatgtggcctctggggacttatgagaagaactgagatggtgaacaagccccctggctctttcagctctcctgggctggatgacccatgaggggcagatgactcactgggggaaattgtgaacttgatgggaatggatgaagaagcagcaagaaaatggaaagtgggagagtgctttagagtgccatacttgtcaattctaattatccatacaaatagatttcaatgcaaagtggtgagtaattaaaaaaaatccatttgcctatggaaatgaggggcataatttattttggcagcagattccccttgctaattatatttttcataggatgaaatttaaattaattttcattcttgatcccataggagctggatgttggtgggaagttgtgggagttttcccgggagtaagagggctgccaggtcaagcatttgccaaaaataggcacaagtgggacagtctccatgtgggaaagcactgcaaagaatgggagagtgaacacaaaaccaagaagtctgccaaacgtttggttcagaaaagatgtagaaatgtagaaatgtcccagtcactgttgccatcccaggaacagaaacaagtccatgtcagttatgtcctatttggtaaaaagtagaaggtgactcacaagcaacaaccatgggccatttttggtttaagttacttgtcagtgctttgggtgtcttctaatgatttatctctaactcttgtccatcttttggggctctgcagttctagttaggaactactccaaacaccagtctgcaacaggcaacaattaaatatcactgcacttctattttattcacccctgtttctaggaagggcaggaagaaatgtgcctacaagagacacagggggaaaaggggagaaaataattcaccattgacataattgatataatttcataattaaacccaattttatatcaattcaccattgatataatttcataattaaacccaaatttgagaacatccttcatttggagttctatatatatttcttccctgaatcatcctaacactaacggcttcccaagaaaccaacattttgatgtcaaagctcatttgaaaaggaaaagaacataagtgagacaggaaataatcctgggagagaaagttcctggaaagcataacctttggaaaagttactaatttagaaaactttgcaggcggagggcaaaatatgcatgtttcttattagcaccaaaataccatttagaatagaatttttcaattaaggatgttaaaattgtaacatttcgcagaacttaataagatgataacaatttgtgtaattattgtactattttctgccattttatcaccgtggtaccattttaatgggatagtatttgatgcttttttattagcagacatgattttttttttagactatgtgacactgggtaaagagaatacccataatttaaattaaaatacccatactaaaatggtcatattaaaatggttcacgatgaaggtatatgatctcattaattttgttaatgatttttatttttgtccagtgatagttaaataggagcctagagctgtctttctttgagacttttcatttcagaaaattatctaaatctacaggaaagaagaacttgaaacatgtagcaagtatagtgtacctctttctgacttactgacttaataccaaagcagtctttctaggagatgccttttccctattttataatgattttatataatttaaataaaagtaccaagtaacatggcccttgtctaaattacacaaaaattagagctaagtggtctataaacaatggcagaaatggggatataagcttctaattaaggctctgaaataagaaaaaatttaattcagacaaacattaataggactttgaaacatattttagaatgtttctagcaatactaaaaatgaatatgcagttactagtgaactaagcggaggtttgctacacatgtggatttgttatatgtatggaaataatctattattattatatattagaatactaaaaatgccttaggactctcataactatatataatcttagtttgtaaagaacaaaagatggtggtatagtacgtcataaggtttcaaacagtggttttatttagaaaaagagtgtgatacgtagtgcattgcatatatacattgttttcatccaaaataacttctatgaaaacaattctttgcaacacagtttaaaataagcagacagtgaatttaccttgagccctagtggggggaaattctcttcaactctgaattttaaaaggttcatgggtattcacatcaatgtgctgtggtgttaaaatacatctcattttgcatctaatctccttcctatataggctgataacatataataaatgagttttccctcctattcttgtaccagtcacaaaggagtctatagcaacgtcctttgtgaaattagtaattttagcccaatccatgctgatgattatggagatgaaacaaaaagcactgcattttacatttaaaaaaatgactagctggtcaactacccaggttaataacatttctctgtatggaaaagcttctcagcatgactaatttgtctttcagctaactggaaaaatcatcatatggattatgtatatgtggggtcgttagggaatctttgtacttcacagaaaataattagagtgtttcttgcagatattctggaaagaccaaaggaccctgtgaaagactgcagatgagagaggaaaagcatggcaaataaccttagcattaggaagtaataagaaaataaaaatgaaattgtgaaagccaaacataaagtctttttgtttttttggtacttctgtacagtgaagatataccctaggctgtcaggaccatattaaatgggtcatagttaaattgagtgcctctgataaggggctctgccaggctatcaaagttttccatcagctggattgaatttccagcatattgcacattttcacacattcattctctcttcctcctttcagtgacaccacaagggcagccttagatatgcttacaatttgtggttttataatgcaggggacatctgtgttttcaaagaagggatgataccatggaagccaagagcagaaatgggatgagggaaagaaaaaaaaaaaaaaaacttttgcaacgaacataatctgcatataattttggagagtttgtaaaaaagaccttatggctctgtagagtcaagagctatttgaataaaaaaatttaaacatccatttctctcaaattaaagtctgtgaaacttgaaggaaatctaaacatcaataagtatttatagctaataattaataactaataatgtcaaccatggtcactttaaaatctcctctactcttgaatgaccccagaaaataatgcagggaaatatttcaagttttccctcagaaaattgtagtatgtcctatattttaataatctctttattagagtacaaaaagatatggatatagtaattccataaagagaatattttgtgtttaagtgctctggaacttgccaaaagcaacaatgaatactattaaattatttacacaagtacatgaagaatgtacagagagtaagtgcaatttaaggtaattttaaaacaaaaatattaactgaaactagtacaccccaggaaaatataaaaaatactctttcatttattttttatttatttttttgagaaggagtttcgctctgtcgcccaggctggagtgcagtggcacaatctcggctcgctgcaagctctgcctcctgggttcatgccattctcctgcctcagcctcccaagtcgctgggactgcaggcgcccaccaccatgcctggctaattttttgtattttaatagagacggggtttcaccgtgttagccaggatggtctcgatctcctgaccttgtgatccgcccgcctcagcctcccaaagtgctgggattacaggcgtgagccaccgcacccggccttattttttaatttttaaaaagaaggctactccctgagttctggacctcacaatagactaaatgatagggagccaagttccaaaaaagatttcttagtcttaatagcctctgtctaagttgcatgaattggacatacaactttcataaaacatgaacaatgcttaaatcaaatcatcaaaataggcaatactctcttaaattgtttagcacttttatttttaaaatcatgttcattcctttttggtggcaggtgatgttagaaataatcatcaaaacaaatttccagcccagtggtgtaatttgaagatgataccagtagcatcatttgcctggactcactgcgattatactcaacgttctgaaaacagctgggaaaagcagcatttcctgagagccaggcccactcgaggtccagctgccagctctctgctgcagttgtcaccaggatttcgctctctttttacaaatcctttttcactgaccttttctttcccccagttgcaatctcttacccatacattttcattagcaaacggtagaaagaccccagccagaacatctcagattgtagcacttgataccaggatggtggagcacttaccagggagtcttttggtacttccatatcggctttgattttcatgtttttcttgtggtttccttgagtactgatagagctgccgatgagacaggagccctgagaactgccctttaacacattcctgcaggaagcattacttgatccactttctgtctgtggagctgctttcttatcaactctgcaggtagaaagtgattcctctgataagttaccttgctccttcttcaatcactctccttttcccaatctttttaatatttaaagtaacctctttgtagctctttgtctttaaacctttgacggataagggtttctcatgggccttgatcaaatcttcaaatattctagtagcatgtcaatttagatttgacaatatcataatgtattttttatttttgtgatttcttgtggagaggggcaaaataaaaaccactgaagagtgattattaactacatttttagcttaagagcagcaagaaatataattatttctggaaagtttccaagtatatgtttgctaggtataatcaacgaaatcggcatgctttaaaacgtatgtgtaattttcttccatttcacgccatctgggtacattcatagctcctagtgtaggtggaattgctatcaaccctgataaaacttaccattctttaatttcaaaggccattggtttggttaacaaagtaacatggactaaatgatcattttattgctaacttttatttcattgcttaaattctggctaatgtataaaagactgctactattcatttctgcctgtatgaaaaaacatgcttgactggcctttaatgcacaggaagcaaacaactcttttaaaggtggtggagggacccctctacattgctacctgcttttccagtgagttacctgttcaagagttccgtcatgaaggtgtctttcgttgaacatgcaacagggctgtgtctattccttggttcaatcttcagttggttgtaaatgtcttgtggtgttctccgattatttttgctttgtaaaccgccatctggattatctgctgacttggtgtccttgataagctcattttctgtctcacactgtagttcaggcttctttttctctttttttctttctgattttagttgtctgtttccaaaccccaagacttttgcatctttcttttctactttggttttggagatgtccattttcctgctactcagagctggaagtctactcttccgaaaaccaaaccagctggcaaaagaaggcccaggcttctgctttgcttccacagaggtgggctttgtttgcacttggcccttttccacattttcctgaatgcacaacatgaccttttcttcgattgtgggtgagaggggggcttctgaactcacagcatcagtcgcggttgcagaggcatctggatgccttccagaagtttctagcttggatgtactgcttgtttcaaaagtgcttggatgctgagtcctccctgggctctgcagggcttcagggcagtctgttggggtgggtgggcaactgcggcggtcactgcctggttccccaagtacagccacattggcactggggcactctccctgggtgaaggcctgctggtcttcctttccaggtgggatgaggagtccctcagactttggagggatcctcaaaggcaacttacttgggctcccatgctgactgctgaagctgcctgagctccccagggagcccttcccggaggaggggtgccccgagggcctcccaacactggggagactctccaacatgggagcagaaggggccttgttgggagagctttccgtggaagagttctgccgggtaagagaattgcctctctcggcggtattggtaatgatctgagtgcggactttgcctgacccttcgatggggggcgtagaaggcttgtctcctgagtgtgtactgaagctgtggctgcgggctttggcgccattcatacccagagctggttttaggtgtggtttgctggaggaaagggatcttctcatggatctattatctaccccatcccttccatcactcccagggatgctactttccaatggctcttgtagtgctgtttccaggggaagcccatcagctaaactgccctgtgcttgtgaatccggtagggtcacatttctttcacccgctgtgatctccatgcttgctggattcttggagtcctctggcttagacttgttcacagccacggaacttttggaggcttcatttaaactgtctttttcatgtttccctggcacggtggaacttttcctgagcagctggggagacttcatgagcactttgagtcccactggaaggcgagttttcagtcctttctcatgagcactttgacaaccatgagggctgttatggcttttggcgggtgatgaggatgatgaggaactgctgacctgagatgatggtgactcatttacccctaagaaggaaggcttggggggtgtggaggcgctatcattcaattgtccttttctccctggagatacacttttggaggacgtcatttccagtggctcatgggttgaaggagagatcctgggagtctgtaatcctatgtccctttgtggggtcccaagtgtttggcgaggagaggttttggggacacctctcttcggagagacctttggaggccccagagccattacggtgaaggagctggagggggcatgagcagggcatcgggtttgaatgactgcttctggggagggcatagggtgagtgaagataggctttttgaaggccacagaaggtttcttcctctgcacttctgtcgtggccggattagaagaaataactggagcagaaattcctttcagcagcggggatttgaatggggtccttgctgtttcactggggaccctggtttcggacttggtggatgaaggtgctggtgaatagtcatagctgggcctggccagcagggagacggacctgcctggagggggcggaggggaaggggatttcacccctgcctccggcccagagccacagtgttcatccctcgtggggggctctccactgtcactagactcaatggcaggccttgaccgtgaccctggagtctgactcttggggcactggacccagtccctcctgctgggcatcctggagctgtgcggaagttgggcggaatgttttggaatgtgtggatctgatcgtaattcaaagaggggccctgagctctcagtcttcatgaatcgtgagagtttcccaggagctaaggctggtgatttttcaagagtcaccaggccagatgaagggagtagtgtggtggcttcgggctccattagttttgatttctgaggtgaagacttgcccctgggaggtatttttgtcagattttgcttttgatagatgcccatgggtgccgaagacctggaattactctggcatgatatattgtgtgttggtttgaccagcttttgctgctgaggattttgtgtcactgtcctggagctgaaagattcagtggacaccctgggaacattatctacattatcttttggaatgtttttctcagtgtcctcttcagaccttttaaagaaagtatagtctcttgcagcagctcttggctgtaaacaagcaattccctgaggtaaaagctcagtatgttctgccttgggtccagcaggagttgaattgatggaaatctcatttctggtaacagtgacaaccccagtctggtgagagctgaattcaatgggctcaccgtcttccgcatcaaatatcacagtcacacattcttctgaagaagtcctttttacaactctttgctgcttaatgaaactaaaagtctttggcctagtctctgaagggatgggcacttgtttttcctcctcttcaggagacccacatagagattttccaaaccccacaaggacatccaggttctccacggacttatcggtgtcggcagccaatgacacgtctgaaggacttttctcatcactgctctctatgtgcagctcatcaaacgtttcattgtcatcagtgtctgaaagctggaggttgagagccatgcggccatggccttggccctgtgggcccctctccctctgtacctgaggcgtctgcacacttgggcacagcttcatctctaagggacagctgctggcgcaacttgtcagcttttcaggcctttccttgggataaactgaggatgtgccttccagaaagtgttttctgtttgtctcccagccaaacagactgtcggaaacactgtgggttaatttactgccatgtggcctgcagctctggtttggaactgcttggagcaatgctaaggtggaagggtcatcgtccgcatcaacgtgggaatctagatcataaacaaatgtcttgtggggttccttgcaggggctccccaggtcagctgttttgcaggggggatactccttgaggctgctacttttaattccaggagaatatattccttcattcgagttcatgcaatctttataaccccatttggttatcactgatgggggttcaagtaacacttttcgcttctgtagctttcttagcccttccaaaatgtggctttccttgatacgagttggaggtagttcatttgtaggactagcaaagccacttgggagcgaagaatcaatacttagccttttatcccagttttgtgatgattgctaggaaagaaaagtagacatcagaaatgattgaaccatgtagatcacaaagatataaaaggaaaagtacatcatgggacttaatttgtgctagtggttggtaactattcacatataaatgcctacattaattagctaattaatttattcacaaactatgcagcaaacattgattttgccaggtcctgtgctaagaagcacagcgatctaaagaaacagaaggtaaaggccctgtcttcatgggaggaatcccagtggggagaggagaattggccacaactaactgtatgtcaagggagaaaatgggaagtgcaaatgttgtaagtactctggagattcagaggagggaggccacagacaggtctatttggagaaaggcatataggaaaggtatatatatttttttcttttaaacttacctagctcttgaaagacacataggtttgccgtaggttaaaagtgggggaaatgttttccaggtgggagaaatggggtgggcaaagacctaagtcagaaagtacattcaaggtacattgagggaatgactagaagatgatatggccttattgcagagtgtctacgagaggtgcagagggtaaagctggaaaagtaagttggttgatatctttatgctcacatttgatagttctgtgacttcataactttatttggtagacaatagatatctatgaaaattttcttaagttactacactcatacatatacacatacacacatacacagcagctgggcattcgctgttagaacctgacagtaattattcacctaccaaatttagaaaggtcaatttcctgcccatcacccttcccaaatgccagcctcagctttggaaaagtgtatgggaaatgacatagagaaaaggctgtgctctacatattcatatttttttcatagtattgctaataagaaatggaagggggaaaaaaaaaagctaacatttactgagcctctgctgtacaccagccatttacagggtgctttcactccatcttcagaacagacaactgagactcattgttgggtctgttggagatcacatagaaagagctggagcaaaggtatgacctctggtttctcaggctctttctatagtacgtcggttttgactcagttcaaaagtggcagtgaggggacatgaacccaggcagtctggccccagagcttgcagtcctaactgatgctatatataaagccaagcttagcccctcttctcccctttaccttagtcagtgtcataatagagatcacaggttaccccacactatttcttaaatggtacttgcagagtttagggggctgacctaatgatttcttaagaaggctatatgggccaggcgcagtggctcacacctgtaatcccaggactttgggagaccaaggcaggtggatcaaaaggtcaggagttcgagactagtctgacccatatggtaaaacgccatctctactaaaaatacaagaattagctgtgcatgttggcgggtgcctgtaatcccagctactcaggaggctaaggcaggagaatcgcttgaacctgggaggcggacattgcagtgagctgagattgcaccattgcactccctcccaggtgacagagcgagactccgtttcaaaaaaaaaaaaaaaaaagggctatatgattaatggtaaagagcttcaagagaaggctctgggtttcagaaatgcactctataccagttttggctacatcagtctcctccctgccccacacgcttatgtgcagtggttgaaaaacatgtcagaaacttccatttgaatctgggcttcttagtacactgtaaacatttgctcacatctatggcattttcatgaaaattactcttgctatcaacaacgcacacatttatttgtttttaaatcaaattataaattttctttaggaaattctccaccgtcagaagttgctggcagtagatgctattcagtgatgctgccccacttcctcttccctgtaccattacaaactcctttagaaatcagaagaaatcccattagtgaatctgggtattatagctccaccagaaaggagctgccacagtgtaagtttctaagaatttccatgatcctgatagtcatgttgacaataaataagagaaaccaagccaaagtaccccacaagagcttgaaaaatgtggatctgtttgacccccaagaagacatgctcaacctctgtcttgcctcctttctgccattctggagcctgccaggtgctgcactgcgacttgccccagagccagtggctgcaaacctcccagggcccaggctctctgcctggtgagattagccacattcctccttcagtcctctataggaggttatagtatctaacaactggagaaaagtctaggccaatcttgaagcttgggggtaggagacacacgaatgccccgtgggagtgatggtggggaggagctggcatttctcacaggcagatccatcctttgctgcgaaagttggaagagagttgctcttgggaagcagtgtggttgactaaaagatgctgttgctgaggtgcaggcctgtgtttaatgtccacagtcctcttccatttcttgactggacaagaatcttatatatatatatttttctaaagggtcttaatgggagcaaactgatctcaataattgaagcaacctcaccacgtttcaggctgattcaacaaggccagtataaaagaacaattaagaatgtgggttctggagccttctggcgcctggctctgccatgtactgcctgtggcatcttggttcagttatttaacttcttagcacctcagtgtcctcttctgtgaaatggggagaataggagagcctacttaataggcgactgggagcattacatgatctaaggcttctgaagtccttaaaaggctgtgctgcatatggtaatttctcatcgactagagccacattcctctgtagggcaggctagtgcatttcatgcaggcttcctttctgtttgtacacaagtaaaacatacttgtgagctcaaaaagcacaatcaataatatattaattgttatataattaatattcaaattcaaattcatatgatacaagtttattatgtaagttaatactacatgagtacccagcacaaagtaagaaactgcagaaagtttcttaagtaatacacatttcaaatgtcttcatgaatctgggtctggcttgttaggtccctgagaaacaagacagttcactgtgagatatgacaggtgtactggtactccatgaccatgacagagccctattaaggatccagagaagagccacctgagtgtccatgaagtgccttaagaaccttctttctcctcattcaggggagagattgccttagaacatcaaaagctactgtaattggaagaattccagccaaaaattaaaagaaagtgaaaagcctttgagaaggagagagacaaagaggtgtgaaagtgaaaagagcagagcgaggggctctgggagccagggatattcacaaagcgaggaaacatccctgaccatctgtccagtctgttccaaaccaggctcagagcagtcattattcagagcacctaacaactccttagagggagcaattttgataatgcagcaggctctgtactttgcattggaagtctgagtcccagggaataagccctaaatgcaaccttgagatcttctgagttcttgttcagaggatgacaaagctactccctcatcaatatctcctgggagttctggatttttcttggtttctacactgctaaaaccatgaactaaatttatacaaatggtagaaaaatgacctccaaatactctgatccggggtttctattcttgtgtgctctttccttttctccaacattagggaatggataaaacagctatttcaaatatttcccttacatcagtgtacaaagacgtctgctcaaagcacaaaggtatctccagctttgcgagtccactgtgcagatgggagtcattctagtagtagtaattattaaaaatcctggtaaaggaaatcttggcatgtatataagtagaaatatgcctacctacactgaagttgtggtctctgtcatctcaccacgctgccctccaatttatagtcaaatagtgttttatgaggctatagcattgatgaaaggatgtcagtataatacatgagcaggtgctcagcaaatggtggcttccttcttacccctcccacctgcccttcatctccatgaccaaatcctaccagaagaggattcttttctggttcattccgatgccacagtgccttacccttttcctgaggttcttcccatcgtgccacgtgtaggaggagccactggagtactcgctgcaggtgcttgaaagagacagttcactgctgctactgtagctgtttcgaggacagagatgaccagggatgacagcccccaagccagggcatttcaaggccgattttgtatttagttggtgttcctgaaaaagcaggacagctctgagcaagggctttgctcagaggagagtaaatatcaacacaaccttatggtgaggtagatgggaatacagatgctcctcaacttatggcaggagtacatcctgataaacccatggtaactggaaaatcagctgaaaatgtactcagtacacctaacgcacagaacatcacagctcagcccagcctacacttacattagcctacggttgggcaaagtcatctaacacaaagcctattttataataaactgttgaatatctcatgtaatttattgaatactgtgctgaaaatgaacatcagaatggttgtatgggtgctcacagtacagtatctactgaatgtgtattttggctccatcacaaagttaaaaaatcctgtcgaactaccctaagctgcagattgtctgtatggtatggtatgataattacgggcagactttggagtcaaatttgggctcagatcctggctctgcctcttcctgtgtggctatggggaaactatttactctctttcttcaaaggaaatcatgatactattgcttatcttatagggttattgcaagcactaaacgagggtctagttgtgaagcacatcacagcatctggcctctagtaggtgctcaattattataagctgccatcattattaggcaaaagtaccacaagggtggtcttattttatctagccatactggtgagaatatcaaatcagtatcaaaacatgactcgaatgctacaaaaggacgaagatagagtcacatctttgactacaggcttcaaaagcatgtaaactggctgtgagtctagtggtctggatcccgggctacccactgccactaagcatgcactcttgagcaaggaagacttctaacttctgtggtctttaatgtcctctttatagagggtgccgctgtctgagatttctgctacactttcctctggttctgatggcatcatactaagtccacaaccagatgcccattgcctatctgtgctacctcacaggaagccaagcacagcagacacgaaactcaggtataatgagcctccactgtaaatataatagtgcttttcatatccagtccttgttaccatttggctatccacatggtaataaccctcacatcaggtaggtctgggtttttagtggaaggttcaagctgttagaattctagtggttcttcataaggcaagggtgacaaataaagctgtaaacctccaaacacatcttgacagccacattataggcccctcgtgtaacagatgaagctctacaaactggacaggctaaattaatttacatcccaaccactgagaacagaatctctctattgccgtctaattccagtctcctttttatataaagctttgtctcagaaactctttgatggtaagccatctgtctttgtgtcacttgcagagtggcaaagccttttacttatacaatttattgacactttgtgggtgcctttcagtacctgagtacttatcaccattctccaaatgcaattccaactgacggtgactaaacaccagcttgggaaaggaaggtaatgatgatcctacagtacttgtggtaaatattaaactcctacatcagtacacagggcatgtttaatttactctctaatcaatacctataatgctcaattcccagttctcttttaatgaataagcagccctgcccactcatgtccatgtgtatacctcctgtatagatgttggggtaagatgacaggaaagtaggactcagaagatgggctggagtgagaaggaattgctgcttctcccttggccttgaacttgagatgctctgttttgttttgttttgttttgttttgtttttcagatggagtttcactcttgttgcccaggctggagtgcaatggcatgatctcagctcttaataacattagattttcagtattaggcatctgccttactatcaatacttcatttttgctgcatagcaatctctttaagtgatctaaaaatgccaagaaattttactatcctatttcttccccctgaaatttggctctacatattattgaaaggagaaacttgtcttaaaatcaggctttcagcaatatctactgatttatgaacttgtttattgccggacgtaacttagttaaggggagttcatatttgtatctccacagatgcctacaacaaatggttgtgtcgcagagcagcaactgccatttcagcctcagccactgttggcacctggaatgtgcactgaacaaactttcagaaatatctcatcaggcttcacttctactgtgtgctttctgttttctcctgtctgtcctctcatattttgttgtttaaatacgcagtgtggtggttgttatttaggactgcctctgctctgacagatgtgtctactctacagagagagagagagactgtgtctattgtcccaccaggctgtccagatccaaactccaatgacctttctgcactctgcctggctattggttacagtttacattctaccttctcccaaggtattgagggaggcttgcatgcaattctctgtccttcccgcctgttcttcctactacttctattaaaattatacctatttttacaactcaattcccaggtctcttttaatgaataagcagccctgcccactcatgtccatgtgtttacctcctgtatagatgttgggttaagatgacaggaaagtaggactcagaagatgggctggagtgagaaggaattgctgcttctcccttggccttgaacttgagatgctctgttttgttttgttttgttttgtttttcagacggagtttcactcttgttgcccaggctggagtgcaatggcatgatctcagctcactgcaacctctgccttgcctcccaggttcaagtgattctcctgcctcagccttccaagtagctggcattacaggcatgtgccaccacacctggctaattttgtatttttagtagagatggggtttctccatgttggtcaggctggtctcaaaccctcaactgaggcaggtgatccaccttagtttcccaaagtgctgggattacaggtgtgagccaccgtgcccagccgagatgccctgatgtgatggcagatacttgagggaggtggagaaggcctgtgaatgtcatgtgggagcaggcaggggcaaagatggttaagcagagaggtgtcctctaagacaggcttttcacactttaacgtgaactgaatcaccaagggatcttgttaaaatgcagattctgattcggtaattctgaggtaggacctgagatgtatgtagtatttttaacaagttcccaggtgcttcaatgctgctattctgtgacccatgctttgcgcagcaagcctctaggagaagctattaaagaagtcagtctcttatgtgagttccctagcagcacgttgtggtacctcactgtctgacatgggctgtgctaagccaggcaaagggaatggctgagcctgcctgccagcaggcacgtaagttaaggagagtgtctgtgtaggtgtacgtgtagcggtagttacagagtaattccttgcaaagaagaggaggcggccactcttttctactgggaaattctcccacttcccccaccttggaaaatcaatgtttgaatttaataagggatgcggaatccctgacatcctggctgcaaagtgagctttttttcccctacagtttccttcgtcagcatgtgattatcacataggattatctactgcagtaaataactgttctgtggttgagcacttgaactccaaggccatttatgaggtttaaactctggctttcacttgctagctctgtgagcttgggaaaattactgaacccctctgtgactcagtttctttctttgtaaatggagatcatgaaagtagttactatgtgggatcattgtgaagactgaacagcccctgacaaacgctggtgcttagggacttttacctgggtgttgctactattattaaaaatgtttatacatatatatatatatatatatatatatatatatatatatatagagagagagagagagagagagagagagagagagagagagagagggtggcgggaagagagagagaaagagagagagacagagacagaggccaggcacagtggctcacacctgtaatcccagcactttgggaggccaaggtgggtggattgactgaggtcaggagtttgagaccagtcaggccaacatggtgaaaccccgtctctactaaaaaatacaaaaaatttagccaggcatggtggtgtgcacctgtaatcccagctacctgggaggctgaggcaggggaattgcttgaatcagggaggtggaggttgcagtgagccgagatcatgccactgtactccagcctgggcaacagagtgagacttcatctcaacaacaacaaatacacacacacacacacacacacacacacacacacatacacatgtgtcttggctcttcaactaagccatcagttagttcatggtctccctacgggaccctgttttacacttcctgatatcctataattccctgatgcctggtacctaagtagtaactacattaggcaatagccaaaagtggatggactttgttaccagggatcactgatgtgagcttctggcttctggagagacatattagtagagccctttctcagtgatcatttctacctttgctgtggtttgctgtgggtgcagcatggtaccacatattaagagaactgaagggggccaaaggaacagagatcttatgattgttccaatattgttagcaggcactgtgtatgcacatttcctgtgttatctcatttaatcctcaccacaactctctgaaatagaaaagaaatatcattatcctcattttctaaaagggaagactgaggcattgaggttttaataccttgcccaagttgccctatcaatataacattctgatgcccggcccaagtccaagccactatgccataatgccaagtcagccctgtgacaatgagcagagctcccagagatacacagaaccccatgaatcccagtgagttgtcattggtaataatgattattcttaaaattcttcatcaaaaatgtgtattagcttctattgcaacattatcttaattatgttgatttaacagggaaaaatacaacctgtcttctgcactatccaaagtatattttcctcattgtttattttagattactaccctgaatgattcatatactttaaacattcttactgtgagaaatgcagtataaaatctacaattttagttaaaaaatagagataatgaagctggcccagtgcagtggctcatgcctgtaatcccaacactttgggaggccgaggcaggcagatcacaaggtcaggagttcgagaccagcctgactaacatggtgaaaccccttttgtaataaaaatataaaaattagctgggtgtggcggcgggcgcctataatcccagctacttgggaggctgaggcaggagagtcatttgaacccaggaggtggaggttgcagtgagctgagatcgcgccattgcactccagccagggcaacaggatgagaccccgtatcagaaaaaaaaaaaaaaaaaacaaaaaaaacaaaagagaatgaagcccagagtttcattcttcccatttttaaataaaaactccatacttaaaaaaaaaaaactcctgactttacggctatattatagattggatgccattaggtctttatgaatgtttaaagtgacaatattccactgaaattcaattcaaatctaacttgagaatatttacatttaatggtctatctacactgatggaattattcagtaaaataaaaaaacagttatccacaaatgttcatgtcattgttttaagcctcacgtttttcattatatatttatttggcaattgtgttttttcaagttactctttttatgtcaacgagagttaaaaagccatgctggttaaagttttgccagataagcacaaagctaaccccagctagagaaaaaaaatgcagagcccatgaatttttaaaagttcatacataatatatcataaaagtaggatgaataatatgggacgtgggttttaataaaaagctccttgaccatttctcagagactctgagatgtaatcaatatccaaaaaaggtatcttggggacaaagccaagatttatgatatttttgccaagaatgacactttctgcttactatatcagctgggggacatgatattgaatttcagagaacacaagaaaggaaggtatttttatctgcctgacaatgcttcaaggatgcactttatggttcgcttgtgacatcatatttgatggaaggaaaataaccaccaaaacaagtgttctgaaggcaactgggaaactcacgtgcacctcagcatcagttcgtgactgtgtcagacttcggtttctttccacctctgaaagcaaatctccagatgaaagatccaagagacgtgagtgaagtttctaggtaaaaccaagcagaaacattgaatagcgataatttaattatttgtctcaaaatcctgccttggacagttaaatctcaaaagacttgacatttccagattagataatacatgtcctaattaaaaaaagtttattctagtttatcagtgttcccatacatgtatatgtacgtgtatgtgcaaattacattttgtaaacaatagtgatgcttttacagtctgtcagtctgccttggaagatatgtagtagaaaaatataagtagtagttaaaaaaataagcagtaggaaaagtatgaatactctgatatatttattgggtagtatgaaaattaacatttgatattcacattaagaaaaccaatcaccaagttcaccttactatgttgagcagtggttaaaatctgagcagataattataaaagtgaccttatttctaaacagcattgatcttgtgaaatcttcccttggacacgttttaactcaaagtcattaatgtcatctgttaggaacaattaatgtgaatagaaaataattgctttggggacctggggactctgaggattttgtacattaatattcacgtgctgttcaattatatactgaattctttatttcagttttgtttgggaggactgctaagccagagacatttcactgtattaatcttgatactaattactaaggcttttctgtggacattaaatttgatctgtttaattgcaaatacaataaaagtcgtgatttatgcttaatgtttctgctaggctgatgacattttgaaaatggcacttatagcctggtttgtcttggttacaacttttgtggctccagatgctaaaaaaaaatctaattgagtaagtaaataatgcagctaagcgtgcctctctcgcttccgaaaagttttttctactcctttttctccctggagaggccctgctgcacactgatgctgatctaagaaatgcctttgcttctttgccactgagcaatgttagaatcatcttagagggcagggctatcccactggtcactctgtcccagcatatctaccatgaagtcagcagggactacaaactccactaaaatgagtcacattctctgtgttccccattcaactctctttaggctgaacttctgtgagagccctgagtacttggttaggtgattattcaacaaacatttatacagcacctcctgaaggatggcactgtggcagggctgtattctatcctcctgcaagggtaaaggtatttttttgctgttgtgggttggccagttctccttctcagtggaccttcaaattgtgtgtctgtggaagtcctttcacaaaaaagaaaataatttctaaactgattgcctgttgctttgaaaatccaaatttctccagcagagctaagacctccataggtaaccagaaccaatgcattgtttctggacagtttttataatcctaattctataatcctaattcaagattcaagctctagaatctgactttcctgggggcaaagatacaatttatctcatcttgcaatctccggaacccgacaaaatacatcatacttagtaagcagcccattagtgcttgttgtagtctttaaacaaaaagatgtctttatattttactcacccatatgtaagttttaaagattgagagagtgccaaaagaattacaatgttgtgagacctaagaatacatttatcaatatgcaaacaggacaagaagttatgggaaatgacattcaacaaaagaaatgattttgagtggtatatcatctgatttgagagaagaggcctcaatggattagctatctaaatgactcagttcatgaatgcacttcattattatttctcagatatatgatgtcacactttcacctactgcatgaatatatgcatctaaaaacctgccctcctcaaggctgtttcagtggcttttatccaaatgggtcccttcccttcattgaaatagggaaggtctgcatgggagaaaggagaggtcctggggcaagggccaggagacctgagttctagccctgttgaaggtacacgttctacaggatctcaggaatgtaactgaacctcttagtctcaaatccctcatctgcaaaaagaaagatggaaaaacttaaaccagagctaccatttgacccatcagtccattactaggtgtgtacccaaaggaaaatccatcattctaccaaaaagatacaagcacacacatgttcattgccaggctatttacagtagcaaagacacggaatcaacctaggtgcaaataagtagtggaatggataaagaaatatggtacatatataccatagaatacagccataaaaaagaatgaaatcatgtcctttgcagcaacacgaatccagctagaggaggccataatcctatgtgaattaattcagaaatagaaaaccaaatactgcatgttctcacttataagtggaagctagatactgagcacacatggacataaacatgggaacaacagaccctgcagactactagatggggaaaaagaaaggggggaatgggttgaaaaactacttagtgggtactatgctcactacctcggtgatgggacctgcatccaaaacccagcatcatgcgatatacccacggaacaaaactgcagaagtaccccctgaatctaaaataaaaggtgaagttaaataaaattcctaacaaagtcacaacatccaatgacagaattataggcatcagtaagtgtaaattttcagaaaaaagaaagacagaagtggctatttaatctactaccacaggtatagagaggcactatcatattaagaagggaaaacaaacaggataatatgctgaaattcacataggccaatttattgttatacctgacagttggtggtaggtaacttcttagataataaggcacgaatgaatcattcattgttatagctttcatacatataaggcaaataaaaattgacttagaataaaataaaatctgtttagttttaaaaaaataatttaaacatttattattatttttcaaaatttttaattattatgggtacataatagttgtttatatttatgggggtgcatgtgatgttttgatacaggtatacaatgtataatgatccaatcagggtaactggattacctatcatctcaagcacaataaaatctacttttgtgttaaggctataggcaaggaaatgataggttaatatcacacaacttcccttaaataactgtgaaagcacacaaccccaaagaaactacatttcttatgacaagaatttttataataggctcatattttcatcatatacataatatacaggcatgtgtgtgtatagcatcactttttatactgatactatattacctgtgcttcagtgaaaaataggtagaatgtatacattagaaatttaagtcactgtcaaaaagagcataactgacttaagaaggccatgacctcttaagaggagccccccagcttagggggcaaattctctatcatatacccatgtatagttcatatttactgttagtgttcatctgaataaaatctcatctgaaatactttaaacttcctgtctttaacctgcaaatcccaatgaattctggagttagacatacttgttttattttagacatgaaaagtagcaggactactcagtataggtttgaaataggccttgtgtcatctgtcacactgtctcagtaactgagattcaactgggtttcagaaatagagactcctaatttcacacattttcaaaccagaggtaagtgagggatctttttactcatatgcttcctttgacggtgacagtctaaccctccctgtcaggctggcttcgctgtctctggaatgtgcccctctcctgtctgagttgatcttttgtccatttttccatggcacactttcctcctcctgcccctagatcctgttcagtattcaggatgacactgaaaccctccctgtaaagtcatctatcctctctaacccacagtggattccctgccttgaggaattggactgcctctcattttggtcctttatccaaagtgtactcttactgagttgttctctgtgtaggttctatcttcctaacaggacaatcaactccatgaaaatgcaggtcaatcccttaatttctacattgtcccagtggcagggactagctgggtgtcacgaaacctcgggaaccttggccctcttctttctgggggcacggctggcctgcatttcccagcctcctttacagtcaggtgtgcccacatgacacgtttagttctagtcatggagcctgagcaaaagtgacatctgccctttcttgcctggcccaggaatacctccctcatatagtcttccatgctctttatccttccactggcttcatgcagacaactcagcacagcaaccttggaagccacttgttgaagatgaagccaaccaggtataaggagtttggcttctttaattctcaattggaagaaagccactctgggaaaagaaacgacttttctggatttgacacaaggaagataccaacttatactgaatttgggccatgattcgtttggagtttgttattattgctgacattgacctggctgacacagttctcttggcagcctacagggtagccactcaagaaacatgcatgtttctatgtatatatgtcatatgtgtacataggtgcacacacatgttcatatatacgggtatttacacatgtatatgtagtggctatgtcaacagcgcaaggtgacaaccccactgaagattctagcttcataggaaagagacctgctttctgtcactatacacaagggcaggggttaggggattgtgtgaagagctaagatgtatcacaatttataacagaacgcatgcctcatacaggtgtaaaataccaagctaagctttggggacctggcaatgccagggtagtcagtgcctggactatacattgggtcggtaatatttggtgggttcacttgccttcattcagtcagttttatgttctctgtgcagttctgcatctgtaattcaaggcagagaaatgtccccctcaacagactgtgccagggactgactgtcctttatctggcaggatgaaggtggagtggacccttcagggtggtagtgactgactctgcagctctctagttaatgatggcagcagagactggagactgaggtgcatttgagcctttggctatttagtagagacggggtttcaccatgttggccaggctggtctcaaactgctgacttcaggttatccacctgccgtagactcccgaagtgctaggattacaggcatgagccactgcacccagcccctccaactattaaaagccaaatatcggcacaaaagagaagttttaaccgttcagcacctgatctgagagaagggatgccaacagctgccctggctgctccccgtcttggtgagtcctagtctgctctagcccactgtctctctgggttctgccacactctgtcaccttggctagctgcttatttggacctggccatgtttagggatcaccctccctcaaatctagtggactggatgttgggctgatttctcagaaaaagaacttactgctttttcagctttagttttgttttcaaatcatctccactttggagagctgttctcacctcacagcttctagaaagcttcctagagccccatttctgctccctcaactctgtcttaggcgggccctgggcccagggtttgattccctttgagcccaacacaagggaagcaaacctggagtgagttattatgaaatctcctgagtatcttttgatattgctcacttcctctgattgcctgtaagttcacctttctagaggatttggtgcatgtttaagagaagcattttaaatatgaccctgaatagacataatcaggtgaataagctttgttccttctgttgggtaacaaggcaatttcacaggtacgcataaggatctccaaaaggaaggtgcaggaaattttctaaaacagcttggagcctgatgaaaacaatttttctgtagaagccaaatgatcttccataaaaaccccaaagttttgccttattcacatactagaattacatttttgccacactgagaagtgtgatttttcatcagcccctccagaatcccatcaagagagattgtggcagatccctgggttcacatttcacaagtttcattctattccattaagaatttattataaaactgaatattatataactgcatattacataactgagtattatatggtcatttcttagattcacaaaaatttgagaccaggacaaaatctttttggataaaagctgatgtttaattgattatgccattatttccattttgggctacaaagataaaacataatatctgcattcagccttcctgctgatgtgacagtgtgccttccaaatgttctcctagagaccctttaaaaaaatatgtccatcataatttgatctcacttcagtgtctgaaatttttacagctaattttttaagccatctgcaacagtccttgttgcaattattattttccctgacaacttttagacttgccttgcacatcaatgtttagctgccctgagtgcattctgttttgctctggatggtgccttggcaaatgacatggctctgtctcttttctacttctccaggacccaaggttataaaatacttttgaaacaattattccacagctatattcaaaaccttcttcaagggtccccacttccatgacagcctgattatccagtggctacctaagggagcagcatttggtttggtgattagaaagtttattcgtggtctctgcagcttagactgatgaccagagcacctcttacctgtccttatctgctgcaattccattaacagtgccccaaggcccacagggtgagcaccagtgggtagatggatgaggatgaaaacagcagaccttgccctaaagagcctcagctctaattagtctaacactgatttacgctttatgctttatgaagcatctactatgtgcagaatcatgactatgagctatgagagactcaaggaagctcattaacagagctgacaatatccctgagcagaccaagcacacaaaggagaaaaaaatacaagaattcttaaggcagaacatgcaaacaagatcacagtagagtaagggtgccatgtagctagagatggtggaggccagtgtattaaccacacagttaaatgtatgtaagagaatattctgtgcaaagggaacttagctcttcctgcagagctcccaaatctcttgaagtctttacaaaacaaacaaacaaacaaacaaacaaacaaaattcggaaatatttcagacctaacagcaaagtgacagaatgttgagaaaaaggacagaaggttaaggctcccatggcaggccagtcagacgtgtgggcaggaggacagctgaagagtgactcgcatttgcttgccaagcctgactctctgaagcttcccttttgtcttcttctgtaaatatgatctaagggaggaagtgattcagcacagcctgagcctattctgggatctaagagacacagaagtgccctgaaatttccattttcatcactaattactttaacaggtactttaataagtgctttccaattgcccccgctgttttgtaaaattatctacactgcattttacatttttaatcaagctttatttttgaaaagttctgactttctgaagattttgccttttacatgtgggggaacacattttttccctctgatttcaccaaactaaaaggattagttagtggagaaaaaaaaacccaaaacttgacctatttttaccagacctattggaagctccattgatggtcactagaattcaatgtaccacttattaggaagaaatgaattaccacttgctctgtggggggaagagacactctgtgaagtcctttccctaatcttatctcatgaatcttcatactactgtgtggaagaagctgtcatcttagtttttagagatgaagaacccaagatgacagaagcgaaggaaggcatctgaagtcacaatgctacatatatttcaggaagcaggagagccaggattctgtcccagacctgcttccttctaagtccaagctcttcctaccatattctgcttgctttttctatgaagggagggacgtgataacatcattgctatcttttacaaggcaaatcctatggaagtagcttatttctgcctaaatgttaagcccacaatttgagcagctcccatcaaattaattatgttgccttggtgattttccttcccaggttctgctttagaggcagataattgggaaggaaataataataataacagcaacaataatagctgtgaacacttatcgagctctttttagcactaagtgtgtgtttcacatatgttatccttttaaatcctcattacaacctacagtaagaactatcatacctgtcttgcaagtgaaaaaactgacatacagagctaaaaaaatcttgcctaatgtcacataaatagtatctgaaccctggacagtctgactgcagagttcatgctcttaattctacccaattaaatctggttaatgatgatttgttatagacaacttattaaaataacaataaaaattaatcagtaaaatgaactgcatagaattaaaaaataattacctctaaatacaatgtgatatctgtttgctagacacaaacatcattcattcatttacttaaaatcatgctttccttattattattccatggttatcactattggtatttgattggtattgttaatttcatttgctttttagatcactacattctttccatggaagcataattccatatgtaaatttggacctaactgaaaaaataaaactatgcaaaaaaaaaaaaatgaacatttatagagtgctcacttgcaggctaggtcttgtgctaagtgtttacattattattatttttaaaaaatttaatttaatttaattcaatattttattttatttttatttttccagaagttattgaggtacaggcggtatttggttacaagagtacattctttagtggtgatttctgagaatttggtggactcatcacccgagcagtatacactgcaccatatttgtcatcttttatccctcgcccccttcccactcttcctgccaggtcttcaaactccattctatcatttttatgactttgcgtcctcatagcttagctctcacatatcagtgagaacataggatatttggttttccatttgtgagttacttcatttataataacagtctccaatctcatccaggtcactgcaaatgctgttaattcgttcctttttatggctgtgtagtattccattgtgtatatataccacagtttctttctccactcattgactgatgggcatgtgggttggttacacaattttgcaattgcgaactgtgctgctataaatgtgtgtgcaagtatctttttcgaataatgatttgttttcctctgggtagatacccagtagtggcattgctggatcaaatggtagttatatttttagttctttaaggaatcttcacactgttttccatagtggttgtactagtttacattcccagcggcagtgtagaagtgttccctgttcaccatatccactctgacatctcctgtttttttttcattatggccattcttgcaggagtaaggtggtattgcattgtggttttgatttgcatttccctgatcattagagatattgagcattttttcatatgtttggtagccatttgtatattttcttttgagaattgtctattcacgtccttagcccactttttgatgggattgtttgtttttttcttactgatttatttgagttcattgtagattcaggatattagtcctctgtcagatgtacagattgtgaagatttcctcccactctgtgggctgtctgtttactgtgctgactgttccttttgctgtgcaaatttctttagtttaattaggtcccagctatttatctttgttgttattgcatttgcttttgggttcttggtcatgaaatccttgcctaagccaatgtctagaagggtttttccaatgttatcttctagaaattttatagtttcaggtccttaatccatcttgagttgatttttgtatgaggcgagaggtaaggatctagtttcattctcctacatgcggctagccaattatcctagcaccatttgttgaaaagggtgtcttctccccactttatgtttttgtttgctttgtctaagatcagttggctgttaagtatttgggtttatttctgggttctctgttctgttcctttggtctatgtgcctatttttataccagtgccatgctgttttggtgactatggccttatagtatagtttgaaattggttagtgtgatgcctccagatttgttatttttgtttagtcttgctttggctatgtggctcttttatggttccatatgaattttagaattgtttttttctaattctgtgaagaatgatggtggtatttttatggggattgcattgaatttgtagattgtttttggtagtatggtcattttcacaatattgattctactcatccatgagcatgggatgtgtttccatttgtttgtgtcatctatgatttctttcaacagtgttttgtagttttccttgtagaggccttttgaccccttggttaggtatattcctaagtatttaatttttttgcagctattgtaaaaggggttgagctcttggtttgattctccacttggttgctgttggtatataaaagaacaactgatttgtgtacattaatcttgtatccggaaactttgctgaattcttttatcagttctaggagctttctagaggagtccttagggttttcaatgtaaatgatcatattgtcagccaacagtgacagtttgacttcattttaaccaatttggatgccctttatttctttctcttgtctgattgctctggctaggatttccagtactatgctgaaggagtggtgagagtgggcatccttgtcttgtgtcagttcttagagggaatgatttcaacttttccccatttagtattatgttggctgtgggatggtcatagatggcttttataacataaaggtatgtcccttatatgctgattttgctaagagttttaatcataaagggatgctggattttgttgaatgttttttctgcatctattgagatgatcatgtgatttttgtttttaattctgtttatgtgctgtatcacatttattgacttgtgtaggttaaaccatccctgcactcctggtatgaaacccacttgatcatggtggtttatcttttctatatgttgttggattcggttagctagtattttgttaaaaattttagcatatctatgttcatcaaggatattggtctgtagttttcttttttggttgtatcctttcctggttttggtattagggtgatgctggcttcatataatgaattagggaaggttccttctttctgtttcttgtggaatagtgtcaaaaggattggcaacaattcttctttgaatgtcaggtagaattctgctatgaatccatctggtcctgaactttttttgttgttggtaatttttaaattaccagttcaatctcactgcttgttaatggtctgttcagggtatctaattctttctggtttaagctaagagggatgtatttttccaagaatttatccatctcttctaggttttctagtttatgtgcgtaaatgtgtttacagcagccttaattgatcttttgtatttcagtggcgtcagttgtaatatctcctgtttcgtttcttagtgaggttgtttggattttctctcttcttttcttggttaatcttgctaatggtcaatcaattttatttatcttttcaatgaaccagttttttgtttcatttatcttttcatcttttgtattttttttggtttcaatttcatttagttctgctgtgatcttggttatttcctttctactgctgggtttgagtttggcttgttcttgtttctctagttccttgaggtgtgaccttagagtatcagtttgtgccctttcagtctttttgatataggcatttagggctctgaaatttcctcttagcactgcctttgctgtatcccagaggttttgatagattgtgtcattattgtcattctgttcaaagaattttttatttccatcttgatttggtttttgacccagtgctcattcaggagcaggctatatcatttccacgtatttgcatggttttgaaggttccttttggagttgatttccagttttattccactgtggtctgagagagtgcttgatataatttcaattttcttaaatttattgagactcgttttatggcctatcatatggtctatcttggagaaagttccacatactattgaatagaatgtgtattctgcggttgttgaatgaaatattctgtataaatctgttaagtccatttgttccaaggtatagtttacatccattgtttctttgttgactttctgtcttgatgacctgtctagtgctgtcagtggagtattgaagtccctcactattattgggttgccgtccatctcatttcttaggtctattagtaattgttttatgaatttgggagttccagggttatgcatatatttttaggattgtgatattttcctgtcggacaaggcctttaccattatataatgtctctctttgtctcttttaactgccgatgctttaaagcttgttttgcctgatctaagaatagctactcctgctggcttttggtgtccatttgtacgaaatgcccttttccatccctttaagtttatgtgagttcttatgtgttaggtgagtctcctgaaggcagcagatggttggttcatgagttcttatccattctgtggttctgtatcttttaagtggagcatttaggccatttacattgaatgttagtattgagatgtgacgtaccattgcatttattgggctcgttgttgcctgtgtacttcagtttttggtttgttgtttttgctttttaacttgtatttttgtgttataggtcctgtgtgatttatgctttcaagaggttctgttttgatgagtttccaggatttgtttcaagatttagagctctttttagcagctcttgtagtggtggcttactgatggcaaattatctcagcatttgtttgtctgaaaaagactgtatctttccttcatatacgattcttagtttcactgtatacaaaattcttggctgataattgttttgtttgaagaggctgaagatagggccccaatcccttctagcttgtagggtttctgctgagaaatctgctgttaatcttataggctttcctttctaggttacctggtgcctcttaggattcttaccttcatcttaagaatggatagcctgatgacaatgtgcctaggcaaagatcattttgtgatgaatttcacaggtgttctttgtgcttcttgtatttggatgtttaggtctctagtgaggccaggaaagttttcctggattattcccccaaatatgttttccaagcttttagaattctcttcttcctcaggaacaccgattattcttatgtttggttgtttaacataatcccagacttcttggaggctttgttcatattttcttattctttttttcattgtctttgttggattgggttaatttgaagacattgtctttgagctctgaatttctttcttctacttgttcaattctattgctgagacttccagagcattttatatttctaaaagtgtgtccaaagtttcctgaatttttcgttgttttttaagctatctatttccttgaatatttctccattcacttcttgtattaatttttggatttccttgcagtggacttcgccttctctgatccctccctgattagcttggtaactaacctcctaaattctttttcacataaatcaaggatttcttcttggtttggatccattgctggtgaactaatgtgatttttttggagagtgttaaagagccttgttttgtcatattaccagggttggttttctggttccttttcatttgggtgggctctgtcagagggaaggtacagggttgaaggctgttgttcagatctttttgtcctatgggtattcccttgatgtagtactctcccccttttcctatggatgtggcttcctgtaagccaaaagtgattgttgtctcttttccagatctagccacccagtgagtctactcgactccagacaggtactgggggttgtctgcacagagtcctgtgagatgaaacgtctatgggtctctcagccatggataccagcaactgttctggtggaggcgacaggggaatgcagtggactccatgagggtccttggctttggtggcttaatgttctatttttgtgttggttggcctcctgctaggaggtggcgctttccagaaagcatcagctgtattagtgtggaaagggaccagctgtgggcggggccctagagctcccaggattacatgccctttgtcttctgctacaggggtggatagggaaagaccatcaagtgggggtggggctaggcatgtctgagctcaggctctccttgggtacatcttgctgctgctgctgtaggagatgggggtgagattcccaggtcactggagttgtgtgcctaggcttagtcatgcaggttgtcagggaagtgggggaaagccggcagtcacaggcctcacccagctcccatgcaaacctaagggccggtctcactactaccatgctccccccaaccctgccccctgccccctcaacagccctgagtctgtttccaggcggaaggtgagataggcttgaaaacttgccccaggctacccaccacccagctgagaaagaaaaaaggcttggttcttcccctgcctgtggagtctgcaaaccagatttgtgccctcctctgagttctggctaggaagcgtctggccctgttcaaattgttacaaagttcagcgggagatttccttcttcctgtggagttttaccccccgctcctctggccaccttcctgatggatccctgtggtgccaggcaggaaggggctgctaggggacacagcaagctcccagggcctttctgctgcttcttctacccatgtatttcactcagctctctaaattgactcagctccaggtaaagtcagaaacttctcccacaaacagaacttcagcttctccagtggtggtgtgtgtttgggagaggaaggtctccctttcccacttccgcagttggggcactcacagtatttggggcatctcctgggtcctgcaggagcggtcgcttcctttgcagggtctgtgagtcctctcgggattgctggtttgttcttgcagttgatctggagctaaaattcataatgcaagcctccgcatgctgccttgtctggagctgcaatctagtcctgcctccggtcctccgtgatgaaggtgatatgcattatttttccttatttaatccttatggtcactttatgaggtagaaactattatcaactccatttttcaaatgagaaaactgagggacaagagaggctaagtaactgttaagtcaaggatttgaacctggacataaacttaaggactgcccctatggcacctcattctctgccactatattgtcttatccgtgcttgaatgttggggtacaatgatgaacaagcacactccctgcatcaaggtgctcatcagacaggcggagcaggcacctgcaacatagtatgctgtgggaactctcggcagaggggttctgggggctttcctagggaagctgtagctaagttttagcacagctaagagatgttactgagaaacgattactcaggagaggggggctgtcttagtcttttcaattgctaaaacaaaataccacaatattgtggctcataaacaatagaaatgtatttctcgcagttttggaggctgtgaagtccaagatcaaggtgccagcagatccagtgtctgcggagggcctattttctggttcatagatggtgccttctcactgtatcctcaagtggtagaaaggacaaggcagctttctgaggactcttttataagggcactgtcccattcataagagctctcatgctcgtgatctaatcacttcccaacgttcctgccttctaatgccatcaccttgggggttaagacttcaacatatgaatttgggggaagagacaaacattcaggccaaagcaggggtcaaaaaagaaagaaaggtctttctgagaagagcatatgaaaatgtccagagacgagagagaatgtgccattttctgcaaaaagttcagcaagaccacagaggcaagttcaagaggggaatggtgagagagatgtgtcagcaatcaggaacttgggtcaagtcacacagtgagcaagtaagtagctgagttaggatctcattccatcactttctgcaaaatacatgctttcctctactcctttgtctaccttattcttttcccagtgctggacttggctgtgggcctccattactcttacctatgcacagaaaggaaaggtctagaggaagggactgcagatgggtctctgggaagaaatgtagacacagtggacattcacacagcttttatgccttctcagtatgcttcttcctaaaaggggtggctggggaagtagggggtcagtctagggccctcaattatgctgcatgctagaaaagagccaccagcactccagtgatccgtaattgctaatcctgaagacatgcagtgactcctcctgtgacaccaaagggttccatatgttatccagatggtcagcaagaaaccatacgtgggccctgctcttgcaactacaatgaggagacattaaaatcaaactattatcacttaactttggaagataacctccaaagaagggaaaatgcaatgtcagtgttttggagaaccaaaaaaaattatgtagaattatttataagatgggtgcttccttacattattaaaggaaagattagaacaaatgaaattcagagtttgagagattacataaccactgggaccttcacagcctgcaatattgactctcacagtattccactgcatgggggctgggataagaaagagatcagagtgttgatgaaaatgactttcgtgatgtgcactcatctgcattttacagctcaatgtcctggttttactaggacaagttgctggagtcccattcattttacaacatttgtgaagatgtattacataaatgcaatctctggctgaatgttcaatgaaagcccactgtctcacttcccttgatagttaatactaagttgtgcattatcagggtttcagacttattacttcagtttgccttatgggctttgttgctacagatctgcatcacggtttccctgtagctttatccccaaagcagttttttaaatccactgttactttaccccatggtaagaaatgcctcatggtattataaacaagcagttgaaaattgttatttatgtggcttcctaatagcaatttgaaatatagggcataaaattactagcttacaacattgttcaatattaacagtgggaagggtaatatgtaaaacagacattaaaggattagctgcaaaatacatttcactaagctaaatcatttcttggcaaatggcagtttccagctaatacacaggattcatcaagtcaagtggatttatttttatttttctattagtttgttaaatatattctatatttaaacttcaattttgcaggtttctgtttcaggcatattagaggaagcttctggaaacagaatccgagatagaagtgatctcaagactttcaactcaaagctgctcgtcgatttccccagcaaatcttctgagttgactaaagatgagactgtaacatctcagagaaaagtgcatggctatgacattgcaaacatttgtatgacagattaggaagttacaagtgcatcagaaatttcactaaaaaggcatatcttccccaagacataaaacaatgtttccattgtttttgcttcagactctacagacacacaacactctgttctaatcaagcatgtctggagttccgtaaacaatgtgaatctgtgaagcaggcacccagaaggaaggtaaagagaaattcctaatctcctagggtggaaattgtgaagtattaagcagatattcaatgcataaatataaataccataatctctctgagacagtctgtagttaccataatcctaaaattattccgtcttctcaaatccctaaagatttatcaattttcataaagtactttgatggaaacttttttcaagatgcaaagttatctttctctgagctttcctttcatattataccatgtgcagtatttgcaacctcggagaataccaaaaatgagttcttatttttcagagaaattggttatggatctataaataactattacaaagaaatgagcattatagagagaagaagctgctcttagactcatttgagaaactatggggaagttcagattcccaagactaattattattgtaaaattaagggtttgctttgaacacttgttagtattcagccgattttaaagacaacaatttttttcttagactgtgggttggagactacaaatattgctcctcaaataccccatgttaataattccaggggtttaaaaacatttattacatataaatctatagtgttttatttagctatttggtgtgggatggtaaatttatttcataaaccctttcctaatggtagaaaactaaggaaataagatgccctttaacttgaatgtacaaaaatttagtcattgtgtaacatgtgaattacttattcaaaaagccaatggttgagtcacagaagacgtcaccaagcccagtgcatcatcaagctctacattggagcaaagcccaggtccacacgctgtggttaatgttaactgccttatcaaaatagctcaattgattggaatccaatagaccaaaattctccattacagccaacatatttgaaacaaagaggataataactatacaactagcttttcaacatgcaggagaaatcctgggctcagcctcaccaatgagcttccctctccatggctacatccataaccagggaggcaggaaagcaggtggccaaaggtgtcatcataatcttgggtttaaatcctggctttgtgtgactagggcaagccacttcatcttttgagtcttcatttcctttagggataataataccaatactagctcacaggggcttaccggaaatttcaaattcaagagatggagctcttggattcgtaaggttgtggtgaggatttaattaaatgcttgaagactgctagctgtttttaggatctggggcacaatttgtggggcccagagaatcacctccactgaagaatcaccctttcggcagcaagctaaaaaaagtgcaaagtcaatagcagagtgttcagctgaggtagaacaaacacaagtagcaagcggaagaggggataggtaaatgcttcagtaggttcgttttgccaatgctgagtcacagttgctttacagtcagaatgtcgggagcggcttgctggaagcccctgcttgtttcaatggatttcctttcctttctccacaggagggctgtccatgccctgaaaggcactcctcccttgacaggaagtacgggaggacttccctgctgaggcggaacactggctccctcacaagatggcctcctgtgatggtgagcagagctagtgtcttcatattcttccctctctgctcacccacctgacatttctgccttgtctcacttgcctgaacactcctcagttttcctgatctggaagctaactggatgacacttgtcctgttactacccatggtccctaatatgacacggagctatggaccagctcttagcaaaacccctgagcagacaatcaatgaaggtatataaaatggcaaatgaagacttgagaattctactccatataatccttcctgacgaatctccaggaactgacagtttcctttgccatagcactatctagacatgacctctcaaagatacaaataaataagagcattccatttctcctattcccttccttgaactgcaaatgtctatctataattactaagtataattacaactgttattatactgtcaccacgtggtactggtaacacatatcttacaatatgaaaatccttaaacaacttctttcttactgattttaccgaggaccaagatagactatgccacatggcaccaaagtaccatgtagcctgctgctggtccactgagtgactgtgagagttttaaattccttttcacatttacttcttgaatctgtcactagactccagaatcatctgaaggaatcaggcagttctcaataccatctcattattgacatttatgttgatcgatgttggctcttacagaattggaatctacagatgaatttccttattagattctttctcacggctgccataatcattttatcacacaggctgatgctatcaaatgctggtttatcactacgtaatgggacaagctaaattagttcctctaatatgttacaagaaataaaaaaaaaaattcctggttttaaatctcatttttctcaaatcttaagaaattccctgatgtttttgtgtataaagaggttaatttgaacttattctcccttaaaactgtgctccatgggagaccaatggtgaattctaagagcaactcacaattctcctggaaaccatttttcctttcctttcagagagcttcagatgtcagattaaccttggccaactggataagcaggggttcatgtcagtgcctctggtagggttcccagcgcctggccaggtagctctacataaaggaggagtaacaaagcctccaacactgcttcacccacaactgaccatacaatggccaagaaaataccagtgtggtttgtgtccacagaacccagccctactcttaggaagacaactcagagtgtatgcttcactaagaaatggtcgggaatgacatcaaatataaatcaaatttatccaaatattttctaaaggttaatgttaaattctttatttatttatttattttttaagacagggtctcaccccattgcccaggctgcagtgccgcggcatgatcatggctcactgcggcctccacctctcgagctcaaacaatccccatgcctcagccttctgagtagttgggactacaggcacacgccagcatgcctggctaatttttgtgttttttgtagagatgcggtttcgccatgttgcccaggctggtttccaactactgggctcaagctatccacctgcctcggcagagtggatatcttgaatcccaaagtgctaggattaccggtgtgacaccatacccagccctaatgctaaattctgtataggaagaataatctaagcaattgtcctgtctctacagacttataatttttaggatatggataatgcagattctcaggagtttctgaaatgagacctcaggaatccatgaatagggccgggtgcactggctcatgcctgtaattccagcactttgggaggccaaggcaggcagatcaactgaggtcaggggtttgagaccaacctggccaacatggtgaaatcccatctccaccaaaaacacaaaaacaaaaacaaaaattagctgggcatggtggcgtgcgcctgtagtcccagctactggggagtgtgaggtgggaggatcacttgaacccgggaggtggtggttgcagtgagccgagattgtgccactgcactccagcctgggtgacagagtgtgacctagaattcaagatatttataaatttggatggaaaaaaaatgcatctttagtttcattaaacttgaaccaaaattcagtatttccttcagttatgaatggaggcatcaaactacagtgctataaacttgtgactttgtctccaacagaaattacagacattttatcatattatagctgttgaaaatatctctaaatattgtgtatgtgtatcactatttaaaaatcaagttgaacttgcctcttgcgcttgctatttcatgctttagaaaggaagcacacgtattaccatctcatatatgtttttccaatattttggcaactgtatttcaatgtaattgcctttctttataatcttatgtcttttatgcattaaaagcattattctgagaaagaaccataggcttccttgatctgaaaaaaaaatggtctatggttaaaaattggttatgaacctcactgctccccaaccctctgtcttatgttgcatatggcatggagcccttctgttgtggctctgacttcccacatgtgtgaacaggaatgggtgaatttcagggattctgagtcctgccatttacctctagaacctggagtcactggtcctggttgggggaggaacttacgttaattcaaatctccactaaaataaattagctttcttctcattgccaagcagagcgctacagctatgactgttatgtattgttgcaatctagaccttaatggcattttagccctgtggtgagctcaagagaaactattttcaaacttcaaaaggccattaaaacatgtgcagatgtctggaaaattaatactattatctaactctcaccctttgcctgtaggaggcaaagaagaaacaaggctcaagaaagatactagagatcaatacacggtcataaagcaaagagctgtccttctagggagcacggatgaggatgagtgagaaatcccacagtgcttctgaagaggctttttcattagatttttttttttttggttgaagtcattcacttaatctgttaaaaatttaaagagggaatgaggatgggatggaaagtggaaggagagagaaaaagataaagataattttctgccaccctacttcaatttggatgttcaaggtccagaattctcaagagtggaagtattcattcattcacacgacaaaacctgaatttgtcaaggttaatgttgaacaagctccagtctgttttaaagcaaaagcgttttgcatcttgaaagatttgagctgcattctgtaaaattctcagtgtagggaggtattctcataggtagtttcaaggcttttataaagttttcagaaccacaggatattctcttcccttccttcattttattcccaacaaatgttatgctataggtgtcctaggtattcccaaaaacctagaaaaccagacttaattttttaaaatcagaggatgaaagctttatattttattaaaacatggagaaagtttttcaattttgaaagaggacagagaaatgggatagcaggtatttttagtaagttttttgttttgttttgtttttgttttttttttaagagacagagtctcactctgtggcccaggctggagtgtggtggtgcaatctcagctcactgcaaactctgccttccgggttcacgccattctcctgcctcagccacccgagtagctgggactacaggtgcccgccaccacgcccagctaatttttgtatttttagtagagacggggtttcattgtgttagccaggatggtctcgatctcctgaacttgtgatctgcccgccttggcctcccaaagtgctgggattacaggcgtgagccaccgagcccagccagtgttttttttgttttttgttttttgttttttttaaatataggtaaagctgaacattggaaatacattgagaatcctttacagaatattacatggattttcctctctgcatagccctttgtaagaaaacctgaaaacattcacagactgtgggtaacacatccttttaaatgggaagttttccttttaaattcaagaataagcaagatgggctgtgttaatcaggattacacctagctttcagggacagaagaaaagattttggtggcataaacatacaagggtttattttccttaagctagaaatccagagataggttgtcataaagattttggaggttgttactgcataattatttgggcttatcctgcgtgataagtgaggcaacataaaatgtgccagcaggaccaagtggcaaatatagtctgaaacagggtcatctatcagaaatctctggaccacattttaattttattgaggtgagtgagatggtggagaggagacagggtgaatgtggagcttcaaaatggatggatataacagtgtgtggactcacaccatgatcttttgctccaagaaccaccatgaaacataccggaaaaaccaaaagaattcacagatcctttgaaaggagtactccactgcaaattccatgaaacaggtgaaaaactgtgagttcccaaagcgtgagggggagaaactacctctgaacacacatccccactggggaatctgaaaactccagatcacccacgggagaaggatttaaccttacctagggatgaaacaggtttagggagttgtgagaaatatagaagtacaagtagcagtgagaagtgccttgaacgcactcccagcttctagcttaagccccaggaagccatccctgattatacctcatgggggccctctgggaagacagccagaggaattgtggaggggttgctgggtaaaggaaactctcaactgaaattggtagtggtttcaactgggcacaaattctcttgagtggagtccaggggaccagcaggagctgttgtggataggagtgagctagcgaaggagctactgcggacagagtggacagacaggaaggggagaggtctgaaagccatgcttgctttctcagctgggtagctcacagtctggggcaaagtgtgagtggggaactgcaggagtgagacccacctcaccaactgcctgggagctgggtgaggctatcccccacttccctggtgaactatataacacagcagagacagccaacatcccctctggaacataaccccattggcctgagaatcactcccccatgccccacagtggccgtggcaagctccacccaaggagagtctgagcccacacctgcctaaccctgccctgactgggtagtacttccttacctgccctggtagctgaacacaaaacatagaaactcttgggagctttatggccccacccattacctgaaaaaccaaaatactctggccatcttagggcaagcttagagtcccctactagcatcttggctgctgctctcttgaaagtgccacctcctggctggaggccaacaaactcaggccattacagcaactcaggacagaatcaccttgatcccaggaagaagacaaaacttgattccactgcctgcaacaccttggctaaccagaggtcctgagggtgtccatgtgacaacttcactgctagcataaccagtattcaagaaagccagcacattgaacatacgtataaccatggacacttacagagtccacttcactcccctgccacctctaccagggcaggtactggtttccatggctgagagacctgaagatggaccgcatcacaggactttttggagacattccacagcaccagcctggagcctgatagccctgctgcatggatagacccagaagagcaacaacagtcactgcagtccagctctcaggaagccccattcccaggggtaaggggagagcacatcaagggagcaccccgtgggacaagagaatctgaacagcaggcttggccagtaggtctggcctctccattgaattagtctacccaaatgagaaagaaccagaaaagtaattctggtaatatgacaaaacagggttctataacaagcccaaaagatcacaccagctccccagcaatggatccaaactaagaagaaatctctgaattgccagataaagaattcagaaggttgattattaagctactcaaggagatacaagagaaaggtgaaaatcaacttcaagaaataaaaaaaatgggaaatggatacaaaattatccagagaaatagatatcataaagaaaaacaatcacaacttctggaaatgaaagacatgcttagagaaatgcaacatgcagggagagtttcaacaatagactaggataagtagaagaaagagcttcagaacttgaagtcaaggcttttgaattaacccaatcagacaaagacaatgaaaaaataatttaaaaaaatgaacaaaacctctaagaaatttgtgattttgttaaatggccaaacctaagaataattgatgtccctgaggaagagaaatctaaaagtttggaaaacttatttgtgggaataattgaggaagacttggccttgctatagagatctagacattcaaatagaagaagctcaaataacacctagggaattcattgcaaaaagatcatcacctaggcacatagtcatcagattatctaaagtcaaaacaagggaaagtatcttaagagctgtgagacaaaaccataagataatctatacatgaaaacctatcaaattaacagcagacttctcagcagaaatcttataagccagaagggattggggtccaatcttcagcctcctgaaacaaaataattgtcagccaaggaatgtgtattcagtgaaactaagcttcataaatgaaggagagataaagtctttttcagataaataaataccgagagaattcatcacaactcagtcagcactatataaaatgctaaaaggagtttaaaatcttcaaagaaaacctcagaatacaccacaatagaactcccttaaagcataaatctcacagggcctataaaacaataacacaatggaaaaaaaacccaaggtattaaggcgacaactaacatgatgaatagaacaatacctcacatctcaatactaatgttgaatgtaaatagcctaaatgctctacttaaaagatacagaatggcagaatggataaaaatccatcaaccatgtatctgctgtctttaagagactcacctaacacataaggactcacataaacctaagggatggggtggaaaaatatactccatgcagatggaaaccaaaagcaagctgacaaaacatactttaaagcaacaacagtaaaaaagacaaaagagggacattatataatgataaaaggaataatccaacaggaaaatatcagaatcctaaatatatatgcacctaacactggagctcccaaatgtattggggtgactgtgggtaatacatctttttggatgtgaatgttttcctcttgaagttcagaataaataaggaatatctcaggatttcattcagctgcaaaaacaaacaaacaaaaaacagaaagcctcacttaacagttacttcagcttatagggatttatatttcttacatagccaaatgtccagaggtaggcagtccagggcttgtgtaacagttcattgatcttgtcaaggaactaaactcttcccatctttctgctctgctctgccctcttttactaggggctcatgccaagatgactgctgcacatcctggcattgcttccaccttccagatagagagaagggttaagaggggatgaagaacatctagagccatatctgtccctcctttatcaggtaacataagttttgtcataaatctctatggcagatttccttttaggtctcataggccagaactaggagaaaaggaggctgagaaatagcatatttggctttctaatctctgaagtagaagaaagaagggagaagaatattgattgtgtatggtggtcacaagtgctgcctatcacataaatctagctctctttccttttgggagtatgttcatcagttgtgcttcctgacccctctgtggttgggtggggccctgtgactagttctggctaatgaattgtggatggaatgcttcaagcaagagcattttaaatacagatgtgaaaccccctcagagctttcatcttgctggcctagtgactggcaatgtttgagatggtggctggtccatcagcaaggtctcctgagtgtttaacatgtgcacagcaagactgatgactcataaaagacatgtggcatgagaaagaaatagacttttgtatttgaagccatggagattttatggttgtttgttaccacagcatgacctatcctattctaactgattcagtgagtcaacttgaaatgtcagcagccataagaacaagttggagaggcaaaaatagtttcagtttcagacaaggcccatgtattagagatccctgaaaaccaacatagatctcagtgggacaatatcctgaagccaactttctctacttcaagagcagttaagtggactttaattcataatgttacacagctatcctcgtactgcccacaggacaccgacaaataatctccctctccggtgtctctacataggtgagtggctaatgaaacatagcatgttcaaggtaagccaccacatttaatatgaacttccaggatgaccatccacaaaaatttaatgcatgataatgagggatggcacagtttatgaccagccttgttaacgatatagttcacatctccacccctaagaggaagacaaaaatctggagggggaagggaggtgactaagagttaaaacgttaatggcctcttcagttacactgagtgtctgatttttatctctaaatacagtatttcacatcctcagcaaaatcaataggaatgtattcaataggacaggacttttccataaggactgaaagctaccaatatcaagccattttaacagagggcaagtcatattatgggagaggaaagagaacattagcagaattcagtacaaaggaggtgattgcttgactagtgatttcatgtttcactgttgctcacgctccattttaactactatccctggtcttactgtgagatgggaggagctagccatatggatttatgctggcaaaactgttgtttccacagcagatggtaacaaaaaatcttacacaacatacttatgtgctaaaaatcacttaacgtaattgtagttaggttaatctggcttgaaatgcatagtgtaatgtatgcagcaaagagaacattaaatggtgacaagtgtaattactgatgtagtcccttccaggcagtcatgctacagtgctcacttgcaaagggcaaaggctagtttggaaacagcaagggaagaacagaaagccgttgttgcacgatgctttacttctgtggagttttcaattgcttatttaaaaggaggtaagagataactaatcctttgcttttgtaaaatctatgtatgaactgctttgctctccatgaatgtgtacacaccttgtttctgtggttgtcatctttggagtgtaaatttttaaagccaaaataaacattacatatttaggtacattaataattattatactaaatagttatggtcccttttaaagatttcagtggattcccactctatcacaaaggcataaaccctttaaatctttgaatcatttaattttatgtattcttttggtattccatttgggagttatggggtgtgaaatatgcatcatgatgagaaaacaattaaacagcacacctgttgtttatgcatattgtactcaggaagggccttctggaaccattatttaattccccagtatggtgtcaaccaaggggctattagaggtgacctgacaacaccaaattatacttttatttgtattatgtgacttgtgctttgccctcctgttagaatgatatttacttctcaagtcaaaatcatgtttgtgacccataataacaattagtgagactttcatgtttaatagaaaaatattagctcacatttgctacagaaggagtgagtagtgatagaattataagagcagcagaggcagtcaccatttaatgagtgcctcccatgcctaggtaaatcaagcagtttatagatagattaaggagaaaaataggacatcctgggtttattcacaatacaggagaagaaatgttctttttgctacattttcattaacagaccattgatagtagaagttcactgtaagtttaacaaaccctctgcaagcatctgcagtgcgatgggtgctgggcaaggcatgaaagacaaggcgagagcagaggtgggggaagagaaagtattggtacttagaggcaaactgacactctaggtatcgacagaggcactgatacgtgaaaagggaagaaaagaggctgcttttcatggggagcagaagactgcatggtggtaaatgtcatgagtgtctgtcattcagatggagatggagtgtatagatatagtcatggaaaaaattacaactgcaacagttaaaatgactgagcatttactgtatgacaggcctgacctcactccttagatgtgatatatatttttttaatttaaaaaagagcattatttttttcttgtgacaaaatatatgtacaacacaaaatttaccatttccatcccttttaaatggataatccagtggcattaagcatctttttatgtgtttgttggccatttgtagatcctttttggagaaatgtctattcaagtctttgcccacttttaattgtattttttagttaagaaataataattgtacatattcatggggtacatagtgatgctgttacacatataatgtacagtgatcatatcagggtaattagcatatccatcatctcaaacatttatctttccttatgtgatactttaatcctcgcaacttccctatggggtggatagcattattagccacattttacagatgaggaaatggtagtagagggataaaataccttgtccaagttaaaaacctagacagtctggctccagagtgtgtgtgcttttcatctatgtgctataaaaaaattactcaacaagacattgttgtgatcacactaaaaagttcataggattctcggtctgtgctttctcatggccttgatttcctttatactgattcttatttttgaataagggcctctaagatagacaggtttaaatgtatttcagctgagttgctgagatttaatggagctgccacttgggtttttcaaagcccttacaaggccaatggttgaccctatacctgctggtagtccttaggggaagcagtacgatataataggtaaaactttggctttgaagtcagattgaagcacaaacccaagctgaggtcacaccagatgtgtgatcttgtttattcatctgtaaaagagagagattatttccttattgtattttcatgaaaaatggagacacttcaggtaaggtactgcagtaagaacagtcctcgccagactgaatctgctggtgccttgatcttgaactgtccagcctctagaactgtgagaaaatacagttctattgttcataaatggtccaatctgtgctattttgttatagcaacaggaacagactaaggcactgatatggtttggatttgtgtccctgcccaaacctcatgttgaagtgtaatccctagtgttggaggaggggcctggtgggaggtgattggatcaagggggtggattttccccttgctgttctcatgatagtgagtagttacagcgagatctggttgtttaaaaatgtgtagcacctcccccttctctctcttgctcctgctccagccatgtaggacatgcctgcttcccttttaccttttgccatgattggaagcttcctgaggcctccccagaaacagatgccactatacttcctgtacagcctgtggaactgtgagccaattaaacctcttttctttataaattacccagtctcaggtatttctttatagcagtgcaagaacagactaatacaggcacttaatgtaatgtgtggaccacaaggagtgtacaacaaatagtctttattatcatgggtcacttcagagtgcgtgtgcttggtctaatcccagaaggcaattatctctctcaagcttccacaggtagctcagcacacaacactgagaagcaggtgtttcctgctggcattttcctatccaaccttcctcaggagtcctgccctagatgcccaatacacccattgccttcctagagcccaagcctgaggcctgtggaggcttgctctggttgttagtatcctctcaccttggtttccagcaatatggtgatgtcagctcaactgtcggctaggagactcagcatcttacaaagaaaatggggatgggagactgacataaccagtaacgggagaaaggtgctcatgaatattcttttacaataataaaaacaacgacaatgtcagctcatcagatgaagaaaatgtcagtcgtgttgtatttattgaatattagtaataatgagtataatacaataagtttaaatatttatttaagcatcaaagtaaacagcatggcttttacagtaaactaagggttgatttataggcttattaagtgtatgctttgtggaaagtttgaagctcatttcgttatctgtaagatgggagcagcaacgcctaccttatggaatgctgggggaaatgaatgagatgattcctaaaaagccccacaggagatactcaataagtggtagctgttgttattatctagaacacggatttgcacaccacaacctatggacaaaatccctgcttttgtaaatataattttattgaaatacagtcacactcattcatttacatattatctacatgagcttttgcctaccactgcagagtgagcatgcctgacaagaggccttacagccagctctttgctaaaatatttactatatgaccctttacagaaataaatgcttcccgacccctgatctggaataggggttctcaagctgtagcgtgcatcaggattacctggagggcttgaaaaagtcagattactggacacctacacccagatgttctgaatcaggaggtgtagggtgggcccgagaacttgcatttctaaaaggttcccaggtgatgctgctgctgttggtggtggtgcagggacctcagttgagaaccactgattctgagaaacttttcaaatttctcttttctatgacttcaataggatacatacacatcattaggtttgtttgtggctgttgaaatacacataagaggcatttatttactctgtctggtgctctggtaaattttcagggcctttccagatttcgtctagtgatgttgactttccccctcttagatcctgccacagtctgaaacacaactgataaaacacaagctttctgctcctcttacacaaacttattctgggtcccatctaccaaccgaagcagaggaacatttctaaagtctgggcattactttctttctacttcctttctccatcctctaaggccttattgaaaacaaatcattctcatgctagtctttccagctcctttccaattttcaaaaattattttcaacaggatacagagcagtaaaagttatccaaaaagttcttgtaaataggactctcaattattttagtttttaatgtggagggggatgggagggggctggagtagtaaactggctcactggtgtttctggtgattatgctcagagtctaaggacagactgttgcttgcaacagtctaaggacagtctgtttccccccttgcagtgctgagagaaagtcaggagggtaaacagtatctcactcccgaagaacaaagggctgaggtggaatgggagctccgtgaccaccagcagaagaggtattttgggcctataaggcacttcccaaatcacaccacagagataagagcacagatgagcctgttcttcccatctattgcatacttgcatatcctgaatattgcttccagcagaatggtaaataatgcatagctgctttctctcactgggagtgacaagggtcccttctgaccgatcacttcctgcagttgttaaatgttagaacaacaaaaggcagtaattttcaaaagaatatgacaaggatcagtagcatttcatggtcttttaatttttaaaaactatacaatatgtgaaactattcttataataaaatatcagataatgtaaaagtgtatatagtaaaagtggaagtcttttttacaatgcttccctccccatctcaccccccttcagtcctgttgtctcctgccagaagtaaccattgtttatatttgatgtggatccttccagaacacttccaatgtatgcaaatttgctaacacatatttaggttttaaaaaacataaataaatggcacagtatgatgcacattgttccgcaacttcttttatgtaatagaatattttgggattctttctgtcagtacacggagatcagttttactcacttttcccaccgcatggtgctccatcacacggaagaaccattcttggcttaaccttttccccactaaactttattttggttatttctgattctttgttgttatgaacaatggggcaataaccattctaaaacttaaatatctacttgtgtacaagcatttctgcagaagagatatcaagaactggcatttctggggctgatatgcatacttaaatttttgttataaagagccaaattacctttcaacaaaagtgtagcacccacttatcacactctaaatactggatatcaatttttaaaatatttgtcaaccaacaatgttgtttgattgctgttttatttttatttctctgttcattgcaactgtacttgaatgtttattggatatctgctattttctctgtgaattgcttctacatagtttttgatcatttttcttttggtttgtttgtccttattgactggtaggggctctttatatattaatagtatggatattaatattggaatttttccctctctgtttcttgtcttttaactttatttacgatgtcttttgcaatagggtttttgtttatttggttaattggcttggttttgtatttaaatatatcatttttttcctttgtagcttctggattttgtatcttgcttaggaataccttacctaccaaaaaattataaacatactctgatattttatatgtaatatattaatccatcagggaatttacttgtgcttatcttgttacagctataatgaattttttagaaatacattgatgaatccctattgtttcatctattgatttaaaataatatctctatcataaacaaaactcccatttaaacattgtgaagatattttccttctttcatttattgttctactattgagccatatcatactgtgttggttgtagctttataatttgttttgaaatttggtaggcaagtcccccttcatgctttcttttgcaaaaattttcttccagttcttgtcaaaatctgtaaaatagcatgatgggattttgatttaatatttttaatttttggaatattatctttaaattattgagtcttcccatgcatggacattgtatcattctatagtaaagctctcaagtagatttgttaataggcatttcatagagtgcttgttactattaatgtctttcactaattacattttctaattaatcattgctggcatgtagaaatgctgtggtttggttttatatatgttttgcatgtatatatggggtacaagtgcaactttgttacatggatagattgcataatggtcccattagagcttttaaggtattcatcagccaaataatgtaccttgtacccattaattaatttctcatcatccaccccccagccacaccccatccaagtctctactgtctataattccattctctacaaccatgtgtacatatattttaacacccacttatgagtgacaatgtgtgatttgactttctgtgtctggcttgcttcacttaagaaaatgacctccagttccattcctgttgctggagaagacatgatttcattcttttttatgtctgaacagtgttacattatgtatatataccacatttctttatccaataatctgttgttggacacttaggttgattacttatctttgctattgtgaacagtgctgtgataaacatatgagtgcaggtttcttttttgtatacggatttattttcctttgggtagatagccagtagtgggattgctggatcaaatgatagctttatggtagctttatttttagtttttagagtgatctccattctattttccataaaggttgcactaatttacattctcaccaacagtatacaagcattcctttttctctgcatccttcacaacatccattcttttgccttattaataatagtaactagggtaagatgatatctcattgtagttttaatttgcacttctctgatgatgtgtgatgtttagcttttttcatatacctgttggtcatttgtatgccctcttttgaaaaatgtctattcatgtcctttaccccatttttaatgggattatttcattgttgttgctgaattgtttgagtttcttgtatattcgggatgttagtcccttgtcagatcaatagtttgcaaatgtattctcccattctgcaggttctgttcactctgtcgattatttcatttgctgtgcagaagctttttagctttatatggtttctttgtctattttttgttgttgttgcctgtgcttttgaagtcttatccataaaaatctttgcctagatcagtgtcctgaaatgtttcccctatgttttcttctagtagttttgggtcttatgtttaagactttaatccatcctgagttgatttttgtacatggtgagcgatgtggcttcagcttaattcttctgcaaatggcaatccaattttcccagaatcatttattcaaaagagtgttctttatccaatgcatgctcttgtcagctttgtcaaagatctgttggctgtaaataatgtgtgtttatttctgagttctctattctgttccattgaacagaatattttaataccaataccatgccattttgattactataggcttgtaatataatttgaagtcaggtaatgtgatgcttccagctttgttctttttgcttaggattactttgactatttggggtcttttttcattccatatgaatgttaggaatgtttctctaattctgcgaaacagtgacattggcattttgatagggattgcattgaatctctagattagggtagtatggttattttaatgatattaattctgcttatccctgagaattagatgattttctacttgtttgtgtcattttcaatttctttcatcaatgtttgattttggatattgcttttatatcctgaaactttactgaattcatttaacaaatctaagagctttttgtagagtctttttgtttttctaggtataagatcatatcatcaacaaacagagataatttgacttcctttttttccaattttgttgccctttatttcattttttagatacagggtctgacttctgtcaccaaaactgaagtgcagtggtgtaatcatagctcactgtagccttgaactcttaggctcaagcaatcctcctacctcagcctcccgagtaatttttctttatttatctctttgtttgtttgtttttgagatggagtcttgctctgtcgcccaggctggagagcagtggcgcgatctcggctcactgcaagctccgcctcccgggttcatgccattctcctgcctcagcctcccgagtacctgggactacaggcacccaccaccatgcctggctattttttttgtatttttagtagagacggggtttcactgtgttagccaggatggtcttgatctcctgaccttgtgatctaccgacctcggcctcccaaagtgctgggattacaggcgtgagccaccgcacccagccaactttttttaaattttaaatttttgtagagacaaggtcttgctatgttgcccaggctagtcttgaactgctggcctcaagtgacccttctgcctcagcttcccaaaggctgggattactatagatgtgaactaccacacccggtctgaatgtcttttgtttctttctcttgtctaattgctctggttaggacttccagtactatgttgaataggagttatgaaagtgggtatctttgtctcattccagttcttagagaaaacgcttttaactttcccctgttcagtaggatgctggctgtgtgtttgttgtatatggcctttattatgttgaggtatgttcctttaatgcctactttgttgagggtttttatcataaagaaatgctgaattttatccattttttttctgcatctattgagatgaccatatgttttttgtccttaactctgtgtatgtgatatatcacatttattgttatgtgtatgttgaaccatccttgcatccctggtataaaacctatttaattgtggtatatcatccctttgatgtgctgttggattctgtttgcttgtattttgttgaggatttttgcatctatattcatcaggaatgttggtctatagttctctctttttttgttgttgtcttctcgtctggttttggtatcaggatgatacaagcctcatagaatgagttagaattcagccgctttgtttaggggttgatctttgccctctcagcgtcttctgtgatccctggttggctaaggtttcctgccttctcctgagatgatttttgtcttttatcttccttagaacactaagcattcaatttcattagtataaagctttcgccatttgtaattcacaccattttgtaatttctaatgtcatttatctgaatttttactttttttttttcctttacatcaggcttgttcaatttgctttctttgttggggaggtgtgttgatttttttcactttcctgcctttaatgaactaacttttcttttttccagttttcattcaaattttacccatcatagcactattctcaattttcctccaaatcttttactgccagttaattttatgtcaattaattttattttatccaagtaaaatatataaaattttaaaagttagatatgactaagcagcttgaaacaaaaaatagaagtgtctcacccacccttctctaccttgggggcctaccttctacccccaggcttctccctgatacttggctccaacttttgaaataataatcatagctaaggcttgcaaagtgattactgcatattaggtactcttctaaaaatatacttggattatttcattcttgctatcctgttttattgatgggacaactgaggtatagaaatattgtgaaacttcctcaaggtcacatagcaagtgagtagcagaaccaggatttaaatctaggtagttgtactcttaaccatttttacaattttctgctgctcaaaaatgctcttgtaacatgtttcactgttatttcttgatttatcaattgcagacatcttccactgacttcccaacatggtaaatacagactaagctctcccatcacatgcctttatttcttgtttccctttcctaactttaacacagtaatttataattcattgatgtttaaactcatagcaactacagcattatcatgaccactgattgcacggctgactaaatggcgcactccatgacctctttcatgaacaatctcttattttcctaggagtattttttttttgtttgttattgttattggtgttttttttttctgaaaatgtgatttttttccttgaaaacctgtatgtttccctcaactctccaactgctcatcagtaacacgttccatattctcagatataaagtttattattttattttccataagttattggggtacaggtggtatttggttacgtaagttctttagcggtgatttgtgagatcctggtgcacccatcacccaagcagtatacactgcaccatatatattgtcttttattcttcactcccctactactcttccccccaagtccccaaagtccattgtatcattcttatgccatactataaagcttattttccaccccctagagccttgcctgggctattgctcttaaggctgctgtacagctgtttattttgttcatgagactgcctagtcatcattctgagtcttattttgctgctttcttgtatcaaatcctgtattaggccaaatacgtcttcccactccgtttcttaaagcacactctgtggtagcttcctaagaaaagggacatgggtgattcttttgttggttatgagtgcttgtaagctggaacatatctttagtctatccccatgcttaattaacatttggttggtcgtagtaggttgagcatttcattccactgtgatcgtgacagtgatgctactgagaaatcagacatcgttcagtttgtagttcctatttcatgacctgtaattgtccctggctgtcctgtagctgtccccacccttgggtagcttctctttcccccatgtgttctaaagcttcataatatacctgctgtggatgtgtcctcaggggctcacaggctttttcaacctgaatgcttccttgcttggaaattgtcttacttatttcgcaattatcttccctctatttttttcctattgtttctttctggtattactattattcttatggctacactgatcctttaatttctttagttttgaactcaaattttttatctctaaacttttttaacttactgggaaattacctatactttaccttccagcccttctactgcgtctttttcattgtggttatcatatttttaattcctaagaactctaaagttttctctgatctctttgtatagtacaattttttttttgcatttttcttatgttttttcaattttcttctgttcactgagttgtttcagatgacctctgggttccttttctccatttgttggttttgatgtcttcctttttaaaatttatcctcaagtgtctggtaacttttgactatccattaacacaggagaatgcatttcaaaaaactgatgattagaaggcctccgtgcatggacagggcttgttcctggctggacttcattgagaatgtggggagctgacttcccactggggagacctccaaatgccaggaactggaggctgtttagctcctgctgagacgagtgatccaatccccacaggctgagagcagggtggtgtacatctgggtggtggtgttctggcagctggacagaagaggtggaggtggggaggggccccctacagggcagcatgaatacttaagcttaactccctcttgtgatccctgttactctggccttcagctgtactggcatctctgagcatggagccctcctctttcaacttattcacaagtcaaaccctttgtttctttgtatactgctgtgagtagtggaagaagtgaatctacatggtcatagactttccaccctcctgctctctccgtggcacctggggtctcccagtggaacccctcatgggttctacagggagatttccttccctttgctatttgctcaatgccaatacttaggttgtagcttcttctgtttaattaattcagttcccactactccatctgctccccctcttctaaaaacttaatgaaatcggggccgggcgcggtggttcacgcctgtaatcagagcactttgggaggccgaggtgggtggatcacgaggtcaggagattgagaccatcctggctaacgtggtgaaaccccgtctctactaaaaacacaaaaaaattagccgggcgtggtggcaggcacctgtagtcccagctactcgggaggctgaggaaggagaatggtgtgaacccagcaagcagagcttgcagtgagctgagattacaccactgcactccaggctgggcgacagagagagactctgtctctaaaaacaacaacaacaacaaaaataaataaaatcactcatctgcttttgctttttctcctgtactgtttctctcttgtgggctaattagcttttatttctatggcacaaagtcccggaagtggggttgctgtgggaagagagtaagtacttttaatttgaatagctattgccagctgccatttcaaaaagtctaacatttacatatatgggagtaccctctccttggtatccgtaacagtaataagcattatttctctccttgattattgctaatataattaaggagatatttagttgttacataaacttgccttttcctgaatactagtgacatggagaaccttttgacatgtttgtgggccatttggatttgcacttctatcaactgccttctcatatatttgttccattttctagcgccttacatgtctttttcttgtccatttgtaagagctctttgtatattatagatgtttgtcctcttaattcaaatactgccccgtaaaatctattgtttgtctactgcttatgttaggattttcaaaaatcatacaaagttttaatttttatagaatcaaataagttcacctttcttttatagcttctggattttatttgattttatgtatggtctctcatattattttgtaatatctactatttcttctacattaaaatcttatatatatctacatttgtttttcatgtggtacaagataaccagttatacctgttttctgtatatgtattttttccaggtagatagctagtagtataagtaccgttgactcttggtgtcaacaacgtgagggttaggagtttttagcagtcaaaaatgtgcaaatggtggagtgcaacagctcatgcctgtaatcccaacacttcaggaggctgaggcgggcagattgcttaagcgcaggagttcaagaccagcctgggcaacatggtgaaaacccatctctacaaacaatacaaaaatcagctgggcatgttggcatttgcctgtcccagatactcaggaggctgaggtaggaggattgcttgggcccaagaggttgaggctatagtgaactttgatcatggcactgctctccagcctgcgtgatggagtgagaccttgtctcaaaaaaaaaaaaaaaaaaaaaaaggcgcaaataactactaatagcctactgttgaccaaaagccttatcaataacataaagactgaacacatattttgtatattatacattttctatactgtattcttacaataaagtaagctaaagaaaatattactaagaaaatcataaggaaaagaaaatatatttacagtagcgtactgtatttatctatactatgactctataccatctgtttacaagatgaattgtttgtctgacatgtggcagttgcagctggagacctcaaactatggtccatatgtagcagttcaatggtttcttataatgtcttgacttttctctggttcttagagcacttccagaatcactagttgacatggggttttggtattgcactaaatacaatgacaaatacatgagaaccaagagagatcactttttgccatgatatgcaattgcagtaaaaagattggagagatgaaatgctcacacagagatgattggcattgcacagcatttttttttttttttttgagatagagtctcgctctgttgaccaggttggagtgcattggtgtgatctcagctcactgcaacctccacctcccgggttcaagcaatgctcctgcctcattctcccaagtagctgagattacagttgcccaccaccatgcccgactaattttttgtatttttagtagaaatgggatttcgtcatgttggtcagactggtctcaaactcctgacctcaggtgatccacctgccttggcatcccaaagtgctgggattacaggtgtaagccactgtgcatggcttcatacagcattttaagtggatactaggaatacttgagctcaccacaatagcagcaggaagtggctgtttaattattacaatagtacagtatgtatacagttaattttacagttaatactgcatctttacacttgtttgcatttttcttgactgccaatggcaccatgtatggtctgtgtttgtgtgcgtatgttttgatacattttacctttttataataggtttgtgtatatttattttaaaaaatatttctaggctttgtggttcacctgtgagttttttcaaattgtcacaaatctccaaaaaatttcactgtatatttattgaaaaaaaatctgtgtataattggacccatgcatttcaagcccatattgttcaaggttatctgtataatctttcaaataatccatctctcttctgcagaactgaaatactgactttgtcatatattagattttcatacatagtaagatctatttctgtacttggttctcttgatattttttctattgccattccaacaccatattgattttaaatataatagctttatagttcagtctgatatctagcaaagcagattctcctgacttttcttctcagacatgtattcttccaaaaccatgttaaaataatttaatacaattccatttttttgtgtgtgagttttaccatgtggctaaatttatttctaaatatattataattttagtccttaccttgaaaggaaataatttgctatttccatttctaggtgcttattgaataaagagattacagctattaatttttattatatttactttcaatccaatgagttaaccatatttaaactagcagattttttattagagattatttctaagaatgtagctatgaaatgtgtaaaggaatacagttttcattctacttttccagtatttatagttgccatttcattttcacgtcttattacctttactagaaccttcaacatattgtaggataataatagtggcattattatttccagaatttaattgcaaggatttctgtgttttgtttgccagcacatttgctgtttttttctgttgttatatatactctattatacttaattggtttccatctattctgttgtacatagagtttttattgaaaatgagtattgaacttttcaagcacaaatgcaagatcttttgctttggccatgtgacttttctactttaatttgaagttatgtcacactgtattatgttgatatatttcctgatattgaactactctggcacttcagaaattgcctcatttagtataatgtatctttaaagacatttctttattctatttgttaatattttctttagaatgtatcttaactcataaatgatatttgtctatagttttcctaggtctagtatttttataagattttggtattaaagttatgctggcttaaccttttgtatggtatgacataatctaaataatattggcattacacacattttttaggattacataaagcttagctgtattcttgtctgtttttaggacctttttcaatggtaggtctttaattgtctttccaatctcttacatcatacacttcattttacagtttacattttgctaggcaataatttatttccaatttgttaggacagacatgatgattattttcttataaacttttattcactgacatctatggctatgatttttctccctcattcttatatagcttagctctcttttattagtcaaatgagagatttgactatttttattggtattttaataaactttttgggaatatacatacatatatatacacacacatataaatctctggttaattttagccttcattgttacttatttccttttgtattttccttttcccaatttctaaaataaattttgctactttattatatttattttctaatactaaagatatttgaggatatccaacttccattttttcttttcttttttttaaatcctttctgagacagggtctcaccctgtcacccaggctggagtacaatggcaccatcatggctcactgcctcaacctcctgggctccaatcctcccacttcagcctcccaagtagcttggattacaagtgtgtgccaccatgcccggatgatttttctttttcatttttttttcactttgttgcctaggttgatcttgaactcctgggatcaagcaatccttctgcctcggcctcccaagtgctaagattataggcgtgagctaccatgccccacccaatttccattttttctgtctcatgtaaattttctatttttgctgtgtcccacaggttttgatatgaagtatatttctctacatagttttcaagatggtttataatgtcacatttgctatcttctttgatacaagaattttctggagtgtattttataatttccaagcagtaaacattttcatttttgtatttataattttattagcttattatcagatagttggcctgtataatctacatgtttttaaattttgctagggtttcctatggagctaaggcataatttatctttctaaatgtttcacagatatataagtacaatgaatataccttattgaagcaaagcagtggtttgtatatggctattatatcaagattagtgattgtattctttatatctttacgttcctattatttatcagaattgctcaattctgaaagaatctttgtgttctgaggtctttttctataatagtattgttttattaagttcaccttacatttaagtttttgctttgtatgtttaactgctttggtttttggtgtatacaattttatgacttaaatttttatttatgacttgtaaattttttttattacccaatgtccctcttcatctgtttaaggcttctaaacttaaattccactgtatctgttgtaatttctccacagttgttttctttatattagcatttttcaagtatctttactcatccattcatttttcccttttttgtcactgtaagtttttctttttttttaataaaaaaactcctattctctaacccaatatggcaatctccaatggcttttgactactttctaatcctatttctctttttaccatacattttagtgtcaagttggtatacttaattttatttcttatatcttactttagatctcttattttatattgttatttcatcactatcctatttagtatttttactaatttaagttgctattctttcccttgttaatttaaaagttctccagtgctttggccctaaataatacacatatccctcacacattttgagaaaatgtgataccaactatttcccctgctgagacatactttttcctttatctctgcctttccccaatctggtaggttgtgaccttaagaatactttcatcttctttcctcttcctcctttccccttccagaaatctctggaacacttttacccttctcctccactcctcccagcttcagggttttactgaggatagtttggcagtttaggatttagactaacagaatctaccatgaaattatctgcaaaacaaaaataagaatatgtaatacgttttctttaaagagcctatcattataaaggtacatgtgttctcacatgtatgcatatattttttctcaatatttataaacttttcctacccttgatattatcttgatttgcttttaatttaaataatactttttaactgtgtaagtaacatctgaataaattcttactgtaaagaattcaaataagaattctacaagaaagataaactcttacttggccacccctcatcctattcccttccttaaagatactcccttaaagccactgtattagtatgacatacattttttccagactattttccatgtgcttacgtatacaggtatatttataaattattcattgttttgcttttctgtgtgagtgtgtatttactataaattgtatcacataacctgtattgctttgcaactttactttttcacttaatatatttttaagatatgtttctaggtcatgaaatatggtttaacttgatacttttaaacttctaacttgataatactggatagcacggatacagcataggttttttgatggccatttaggctgtttctattaatttgctacttgaaaacagtgcacagtgtctcacatgtcaccctctgcacatgaatgacggtttctataaatatggatatgtggaattgctaagtcaaagagtagatgcttttactactaaactgccacccaagaattgctgtacttatttataaccttgccagaaacgcatgcggtttacattttcaacatttgtgtatgagattgtttttctccacctttgagtagagggtacttcaaaatgtattataaagtcttatatattatcatcacacttttatttatgccagtctatttggtgaaaaaaggttatcttgtgttttaatatgctaactggctggtagtgaggtgagtgtctttcataagttcatcagccatttgtgtttcctctcctgttaactgttaactgttaactgtttctactcttgtcttacttcattttaactcataagaaattctaattcatggaattacatgcttcctgtttcagtcctttatttgtatgtcaaaaaccttttctcctagtctattgcctattttgcctaggtatatagaatatttgatcaaccaaaattttaaaattttgatttagtcaaacagtcctttcctgtatgacttcttggttttatgccttgcttgagaaaatatccaatacactaaaattaaaacaaaaagtcttcagtgttttcttcagtatttacataatttcttgtacatttagggtattaacccatgtaaaatttatatttccttatgtgagatagggctccaattattatcattttcaaatgaattatcaaatgcaccacaaccatttatgcatatgtcatcattccttactgctactattattgtaaaataaattctcatataaaaatgggccttttagacttctcctccctcaatctatttatttcttcttggtccaaacccatactgttctaatagctacaactttatagaatattttgaagtaccacagggtaatttttccaccccatacttctgtgtagttctttattttcaacgcttacttggctactggagaacatttctaacttcccaggtgtattttacaatcagcttgacaagtcccataaaaaattgtgttgtattttgattgaaaatgcatttaattttggattggctctggggaattaacatttttataacattgacttttctcatctcgtggagatatatttccacttattcatttcttccattcttttcttattatgttttcctgtttcattcatttagatcttacatatttcttattaggtttattgctatgtagttcatattttttatttatattatgaatgaaatcttttctcaattacattttccaattggttgttactgatatataagaaatatatcggctcttgcgtgtttttctaatatcagcgtaccttggtgaacttactagctttcaaattttcagaaattcttcacggtttctttcttgctgatgaaaaccttcttattcatcagtaataagtatttaatttgatataatgaatttagaggtaaagtttcagaactgggacataaatctaggtgaacagtataacttcctttcttcatattatttcatggtgactctttttttttgagatacagtctcactctgtcaccttggcatgatttcggctcattgcagcctccgtctcctgggttcaaacgattcttgtgcctcagcttcccgagtagctggggtcacaggcatgacccaccacgcccggctaatttttgtatttttagtagagatggggtcttgcgatgttggccaggttggtctcaaactcctaacctcaggtgatccacctgcctcggcctcccaaagtgctggcattacaggtgtgactcactatgcctggcctttcatggtgacttttaacattcaatgacttcttcctccatccctccatccattatcctttttcctcagcacaaatcaagctataatagaaaaaaggatccctggttcttgccaaatccttcattttacctactgagacctaaagaatttaaatgacttgtttaaagtcacacaacttagcactcagaaagtggcagaattggattagcttcaggaatggctttagagtctctaacatgtaagcagaaataacagtggcttaactaaggctcttttataaattgcatatgcttgtatacactacccattttattattccagagaatgatttgtgtatttcattaattaagtaaattcaattataaattaaatattcgtgtattttatgaatgtgaatgaaataggcaaattttcatgccatgcaaatattgtatgctttcaactgtatacttttaaaaagtaggaaatgggccatatttatattataaaaatctacaagtacatacaaagtggctaaaggaaattatcaaaatacttcagactatagggcaatgaaaagtaaaccccaaaagtgcattcagcattgtgacagattaaagagatgtgggaaatatggggtaaaataatgataaaggaataatataattaaatagttattattggtagtgcaatacattgtactaagtaccttacatatgctaactcacttaactctaaaatatacacacacaacaaccaagaagttagtattgtttttctcctttcaaagaggagataactgaaatttacagagatgaaattacttggcaaggtcatgatattaatgatcagcaaagactgaatttgatcccaggttatttcactccaaagcccttgttctgccttttctatatatattgttttccttagaatccaactagacagatatacacatatcatcgcttttggcaatgctgcattagtacgccaaatcccaggataatatttttaagtattaactgagccacaaatgaatctactgccaaaaagctggtcatgtaacttactgaacattttccgtgaacaccttcaaggacatattatcatcaccagtcaaaaaatcaaaagtcattgtggaagaactcctgatacaagcagctacatggctgatatcaaacatatgtgaagcaaaatgagccagatacaaaagagtatatcttacatgattttgtttaaactcttgaaaagataaagctaacccacggtgacagaaagcagatctgtggttgcctggggctgaggactgagaaggattgattgggaagagaaattagagaatccttttggggtggataaaggaggatgtaaatattcttcagaaacaggtcacaactatatgtagaatgtgtttaatggttcctcttaaccagggtaaagactcagattcattaggaacctgctttggagaagttaatttaatatatgttatgtggatcttcagtgtttcagcagtctggtcagagaccagaagcaaaatttagctactgaaaagaacagtatgatagcttagtgaacaatcaattgtggtaatccacccagatgcaaaaagggtacccaagaacatctcacatgtcctgtcctgatatagaattaagtcagcgagttatttttttccttttagaagtggacataacattgtaatgagaagacagttttccatctgaggcatcagcttgcagattacctctttcatttcagcttttcttgtttttatggcaaattctgctgcaacattaatgataacggctttttgcactcatatcattatgagatctttacgttaattcaaggatctcaatgcctgtcttgaacaatgtcaaatgtaacaatgaaatatgagcaaggcttattggaacacatctgtatgcatctcatgtccgaaagtgtataatgtgttctattttgaaattctgatttcttcacaacataaatatatctattataaaatatgattttgaagacatgattcttatcctcttccattcactagttagctatttgggagggaaaagcaatcataaaaaggaaaagcctgctgtgcgtggtgtgcatgtctgtagtcccagctactcaggaagctgaggcagaagggtcacttgagcctaggagtttgagtctgtggtgtggtatgatcacacctttgaatagttgctgcactccagcctgggcaacatagtgagaccttgtctccaaaagatacaataaaataaaacttaaaaagtgaacagaaaaagctaaaaacaactgttttttttaaagatttgcactttgaatttacaaagatgggtattcaggatctgtcatacttggtaaagatttaaaaacaggcctgaagcaaagaaacaatatgaaatagaaagtgtccgatgcaatgtgaatgaataaagggtaaaagggcagttatgatgcagatgatcatcgtggattaaattttaatttgggattttgtaattaagggattaatttcttaattaatagacaggcttcgcagggtccctgaatatcttgaagttacaagctaatttctctctgtatatagggagaaaacctactgtctttctcagatactcaaaggattctgtgatccagccatggctccccctctttttgaaagttaaccacaagattaaatagatagcttaatccagggcatttccaactcctgcttatctcagacactattcttgctgaaacattcactctgagtcacttggttaaaagcccataaggatctacttagagctaaatatccctagagaatccccagaaatacaaattcccaggaaaatccaacaagtcaataatagaaaatagaaactgatttaatacagtatatttttgggccaatatctcattcactcagaccacagtttctcagaaatcagtgctgagcaaacagatcatttgttgcacctccctgttcccctgccacagagatgcaggtcacaaatctcacaagacgagaaaggaaagaacttctgcatttgttagcttctaacattaaggtactagacatttcaagaatggcccgaggtcacctagtcagcatgtggtgcagaggggatgtgaatctcagcctgcgtggatcttagtggcctttcacttctctcctacctctttggtccacccgacatgcctccttggagttcaatgatttagtcagtccactccatctgaaccatttcccaaagctgctcgttagactgagggcacatttctcatgccaagctctttctattccttaattcgggtacatttccaatttattacccccatggcgtagtagaaagggtacaatgctgataatcaggactcctggaatcgagccgctactcttctctaaacagaatgtgcaaccttgcaaaaggcaagtatcaatctgagtgtccaataaccagggaggggggtagattatatgatcttgaaagttgagatataataatatatgattctattattccttggcataaacatgtttctagggcaaatgatttgatcatgttactaggttattagatccatgtccttattcagggaaatatctattatgcccacaacagtgttgtctataactctgattatttggacaccacccaaatgtattgaatttgatttttccaaggtgtagcacattgtcaagtccaaacagaccattaaatgtcttttaattggctgattcattgaacaccactgcaatatcctttccttatgtaggcctgggaaaagtcatgaagtgacatttggaagtgagggcctaagcgggcagtgggtaatttaaggcaggaagctttggaccggagagaaccctggctaagaagaagccgcagcctctaggggctcatctccctgtttgtaaaacagcactaataccctgggcctattgtaaagatgcagtgagatgccttctgcttgctaaaaaggtatagaacaatctcaaagctttatcaatgtaactacaaggtatctgtttgggaaatggcatatttgaccacactggccttcagccaacccagtttcatagaaacactttgctaccttagtacagcacatgttaacctgctagaactgcagggactacttctcctaatgagacactcttgcaaagattctcaggctccttttaattatgttattttacagaaactctgctgatccttctgctttcctacttctgaggtaggaaagggcagagatttatcaaccacagagtatggctggaggcagtggtgacatgtttgtgtggcctttctccggtcaccagtgagtcacagtggcatcggcttcctatcagggtctgtgacatacagggcaatgtccgtcattccagtgagactccttgcaggtgaatggccttccaaatttttcagaaaagcattttttttcaagcatttttttttctgttcttgattttgagatgttaggccgacagtgattgacagaaactgacccaggtaagacatacaaactgctttaaaggcggaaaagtttgctagaaagctattgcatgaagatggttttatgaacaggagacttggtaacatttcctcggtctctcaagtttcacaaaagtgcactatcatctcatctgtctggagatttctattaggatttttgaaaacttgacctgagcttgtgtgtgcttgtatatgaggtagtagatggaagtggggtgtgtctttttgcctttgaatctggcccaactgttctagtgcagccaggtgtaagctataaaccagtggcattaggatatgagagtatcttgccctgagaatctttatcttcatccccctgatcacactgggggctactgtgagcccagtcccagtgtatttctgagcagctgcagcaggccaggcacaactgaaggttaaccccgcttgcctctagggtctggccatcccgggctgcacggggcttcagtggccttcctgcagttctcttcccaaggaggctcagcctgttctggttttgctaagagaccctggatgcgtctatttgcctcgttggtatctaccctcccctcccttccttgacccatgcagccaagattcaggacttcaaagacatccttccttcctgcagcccgacaggttaaagatttgttcccaagtctcctgaagagctgcgtcagattgcaaatcactggccagttccagaaagctgctcccaagtgtttcagggcagctcttagaccagtgcaccctcgtggtaagagaggtgacagaacaaagccagaattgcttttcatttctggaaacactagtctttcatgtcagagtttaggttacttaatcttttcgtgccgggaataagatttccctagtgtgacatctgctgatagcaatggacagtccatgatttccagcgccaagaaattaatactctaatctgcataatcaaatccccaggtaagcatcaccattcctttctcagtactttctgtcccttgcatttccaaatccttctatttatccaaaactcagaatgaaaatgtagtgcttaataacaatttttactaggggagtttttaggttactatgatagacatttactgcacaaaatttactaaattcaggataatcaggttttcttatgtgtttgaaatatgataaaaatatatatcgcctgaatgtttcatgctacagggtgcattttgtgaatttacacttcaatcacttagtctactgcaatataatgttgatttatgttcagggtttgaacctctattcaatgttgaaatccttaaaacaaactttagacacagagggctcttcacttttccattagacttcttaatccagtttaactatatccttcttcagttaaaaagctagaaagaagtgttgttgaaggtcacagtgacagaaatttcagccagcatgacactcctggaggttattgttttcctacagagctggatgagttaatctggtattgttgcaagaggttgggaaggccaaacaaggccgaatcagggtaagacaattttatagtcttacagctataattaaatccaggacctgggatcaatgtaaatataaatcccagtattagtcctgaatttagttcacaaattgctttttggaaactgttaccctagcaaactcctatttattcttcaaagtcaaggttagctgtgaccacaccctagaaggctttcctgacacccagaatagtgtttgtcactttttcctctgaggaccttggatggtatatgtttctgttgcatttactactctactgcacaactgtttgtttatattatctatctccttattaaatgatgacctttttaagtctgaaactgtgtctaaactatctctgtgtcctcaggagctagtacactaccaaggacatagtgctcaatgaatttttgttgaaataatgaataaagcaatatattctggctgtcccatgaatatgattgtgcagcatagtgcccaggtgttctgagcacatgcaccaagttttaaattaaactgccaccactttcagggcagagaaagaaaagcaggttgcaggccaattctggtccatggttgccttattgggtttcctcagtgtcattaaatagctgaactaggtgttagccaacatttaaaatttgagagactacatgcaaaagtctgcatttctagcttcttacaattttcaaagctatggcgacatctagctagcatttccatggggcctaactggctggggctggctgcagggcacacaacttcctttcctgcttccttcacctggcttagccccttaaggcatctgatctccgagcatgagagttttcattgttttggtgagaggatggtttatgtaaagccagccacatagtaatacagattgacacatatgatgggaagtcagccatgtgctcttgaaagcaattaatacctattaatacaattaatacatatatctaattttaggaggatatgaagaatagaaatttaggtgccttccattaagttacttaaaatttaagagggagtagaatggggagataaaaacccatgaaacaatatggaaacatcagtccccctgaccaaaggcacattcatataatacaatctctacagcttacggagccaacaattccaagacagaacctatgtctgcagtctcactggccacaggaagaaataaaacaaaacaaataacaacaaaacacctgaaactcatttaaaaggagagataatttcccctaattatcctgacccatctaaacataatatttcaaagcttgccttcttcactttaaatacacagcaccctaagcactgctctcactcccttctgctcttccctcccttggagccacttcatttgtgaaaccacctccctgtacctctgttacaagcatttccatttgcctggtttcacgtaatccttagttcactcagcatttattgaggctcacgtgtattccagttgtgtactaggaggattcaaaggtcaaaacaaggtttttgtccctaagaaaataaaggccaaatcaagcaagaaaagagtaggaatcctaccttgatttccttataacagaccacatacaccttacgtgataatgctgactataagctgatgggaacacaacatttagtcatgatgcatggactggtaagctctgggtcttgttcaaagaaaaaaaacacacccctcaattgctttgggaatgaagagcaaaggtatgcaaaaagaattgtagcatacttacaaagtaacatatcaatgctgccaggacttagtgagcaaggtgtgagtaggagattgagtggggcagggagttgtgatcttattccaggagtacctccaaagcatatgaatttagaaaccagattgtgaggaagagaatttctcatgcctttgcacagtgtattctttctggatggcatttatactttctcttgtccacctggagtcacatggaggcatggcttcctctgctgggccttccccagggccctctgcaagcggagctaggattccacttgccccacgcctgtctctgctcagctgctatagcttcccacatgccttttagaacatcatttccctttcaggcttaattgtagaccacaggcccttgagcaaatgcattttgccatggactcctcagcactgacattactttgggtgctcccaatttggtaatcgaatgaagaggagtggcaggggtggggtgggcaggagtagagtagcattttgaacagaaaaatgacatacaaagtggaacagttgaaggaaaacctatgtcatgctctgtggagtgaaagtatttctgcttggctgaagtaaagaatttgtgtcaggaaaaaaagaaaaatgaggctgttgaagtgtgaagcaagtctatagagggtcttgggcatattatgaagagggaaaaatcacatcttgccataaccctgatgattctttcttgtcttttgtatagctcttacttgatcccaaaccaacctcacgtgttacatctcatcatcgaaagccttgctctgcaggaactgtgtgatttttcaaagtgtcccttacctctcaaaggggccactttctgcacgtctggcaggttaatatcctttccagtgcttagtgcatgacacagaatacctgctgcacattctccatatgttttcatgtctggccagtgcccataatgaaaccaccaatgtcctgtaaccatgcaggatgacaggctcaccaccagtggatactctgccatctgagccctggtgttactcagcatccctgaagcatcactggctgctcctcctgtcaccctgtgggtgtttctaaattagatatcaggtttgtagggcaggactggaggcgcctccatggctggtccacacaaacagccaaggggcagagttcatccattccagaaactcataaggtgaacttatatcccaacagcgtgggaagccaggtagatgcttcaaacttgtgtggatgttcttgcctcttctcccaactccttcttagtttgtgtctcaagagaggccagaatcgatcagaatgaaaagcttccatcacagaaactcaagaaccacagttccattctttaccttcttctttactcactcacctacccctcccttattgctctcaccacaggctacctgcttaactagtcttttttcttttcatctttttgtctcacttcaactacatatatgtgaaagaaccccaaaggcagatgttttgaaaaagcaaaatacatacatttaaaagtgtataatggttgggtgcaatggcttatgactgtaatcccagcactttagggggctgaggcaggtggatcacaaggtcaggagatcaagaccatcctggctaacacagtgaaaccccatctctactaaaaatacaaaaaattagccaggcatggtggcgggcgcctgtagtcccagctactcgggaggctgaggcaggagaatggcgtgaacccgggaggcaaagcttgcatagaccactgatactacatgaactccagtatggggaaagttcactgaggactgctgaggccctggctggccccttgctgggacagctgtttcttatatgttattttcctttatttcacagctggatctcacagtgggatgcttggcttgtggacaggtggaaaggaaagtgtgcagtgtcttgccagatcagactcatggatagatttacactgaaaataaagactaagagaaaaaaaaagcggaacaagtagaatgtaaaagccctctcatcttactggaaataatgatataaaacactagcaaaaacaaaaagtccgcattctaagaagtaacagcaaatttttgcaccttggttctaagctgtcagatcctccactgttgatgtgaatcatctaccctataaaattcttttcttcctaacttggcctaaggatatcagtagtaggactttttgaaatatcagatgaaaaagaaaagaaaacattgtcttaatctaagaatacgagaataatgtcccatcaggataatggttacacaggtatcccaaacaagtaaaagacagaacacataggaaggggaaaatcttagatgccgcatttcagaaatgtgtaaagatggtaggctccttattgggattgtactgcagaagccctctgatctgactcaatcctaggtgagccagttaattcaaatgtcacctagaatagggaatcagaaaatttgtcctcttactcatttatgttccacgcagagggagcaccaattggaggcgaaaggggggacttaatttcaacagattttcaggtttaaatccttggtctgtcaaatacctgctacaggacttagcctgtctatgccaaagtatccccattggtaaaacgggtgcaatgataggtcctaccccatgggactgtgataaagatgaaattggtgagtgctgtaaagtttgtagaatagagtctgacacatggtaagcactactatgtatttggtaagtgacatttttggtagggccaaggctgcttctttgcttagagatctttttgttggaatcttccattatctttttttttttaatttggcatcaacacacactttatacattgtctatgattcctaatttttgttttccttaacaatggtacaggaacttaaaggcatttgaggagcagtttgcatgcagaattgttccacatttaatacaatttctggtctcccacaatttatttttatagttagacaactatatttaatgtgatcacaaatactactttagcagacctactaagttacaaaaataactcattcttggcaagtattcagctcaactggtaagacaaataagtgtacatggtagagagctctttactagctgccaacattcattaagttgagggcattgttcagtgtgatttgaaagggggaatgctgagcatcagtgaatccagacaagtaggttcaaatgagcttagttaggagattccagtctctgtaagaacattacttttggattttgtttgctatcccgccatctcaattccttggaatttagttccaatgttgattttaatatggaggggggtcttgttaatctgatttattgccacccatagtcccagagatatcattctagaaaatgaaatcaatagagaagtttgttgtcaatcttaagattttaatttcagcttaggcctttcttatttccatcatggacctggctccctttgtaagtttaccagaatctgtcaactaatcctcagagcactccctttctgtctctcccacataagaatttgctaaatgatatccatataacctcttattctgtatttttaagggacaaagaattggctgtttcttataagttattttcctttatactatttataatttgtctacctaaatcacaatgtgttcataactcttctttctgtatttcttttcaggtagcaactttggaatatagagaatcattaggctgtattcaacaaataataactaatgcagccttctaagaagtgcaaaaaaactacttagaaatctgctataatgaatccaaagaccatgggcagcagctatagggtcaataatatttggaaccagggacacactggtggatttgctgcccccacccaccacatcctcagacatactgggctggaacacatgactgtgtagtgcctcaacattcatgtaagacaggaaaacttcaaaagaggtgggagcacaaacctctcttaagtttatgcaaaataactctccagaacaatgaattattatttgttcattattccactcaacgcataatgactgagcatccataggtgtaaagcaagtttggaatgattgtattttagctccactgtatatattttgtttctcaaaccctaaagtactatcagaaaatgaaaagccatgagtgaaataattaacacaccatctgaaaagccagtcatgtcctctgtcttggattatgagctccaagatgttaagagggcaggtatcacactttatatcattattcttcacagaactattaacagcccatcttttataaatattatttaaattagaatggctcctggagggagtactatttggggagaaatatgaagtgtgttggctgaaaacacctaatgaataaacactgatgtctattgttagcatacacatcatcccctgatctctgagtatgaatttaagaaatttgtgacagccaatgaaaatgcttatatacccatagcacgtgtgtttaccatgcaaataaatgatcacaattcataaacagggactgtagagtcttaaacactacttcagaaaggcctcaagttacaacaggcagaacagaaaaaaaatcaggaacatgcaacagcttttaaaagtaattctaatattgaatcttgatgatgagattgcaaaagaaacacaattttttataaatgcaagatcccctatgacaaatatttacggtggtcaggaacagaaaacagaatagagatagatgacttcgctcccaccccacaaaatttttgagtcataaattatgaattatgttcaaacatataaggcagagaggaaattaatttaggagatgagatctattttataattcagagagctgttttattttaatttggggggcaaattacattttgatgttcagcttaccgaacatctttctttctctgaaatgaattacaatttcccgttatttctctgaggagtcctaagatttttattccaaaattcagagggtaaattagcaacacagtctggatcatttggaaaaataccgtccagcagagctttccacaatgatgataatgttgtccacgtgtgctgtctactaaggtagtccctggccacatgtggcttttgatgactggaaatgtggctagttggacatagaaacttaattttaatttaatttaaatttttaaaattaaaatttaaatagccctacatggctagtggttatagtgctggacagtatcatccagatgaccacaggatggacaaggaccttcctctcagccaattagaccacgcagtggtgggccgccctttgcacattgcacactgcccctgtgaaacctcgatgcagtctttgacagcttagcctcagaagggcttgggggcaaagctcatgggagcttgtttaagcaaatatacacattaataggatcacaaagatcggaaacagcaaaggtcagccctgcagacccctctccccattcatatgtttccctgcagtgggacatattctctagtgctttgtcaggaacagcttcaaatcgactcaaatggcttgactttccacagctttccatgttatgaaggcaagtaaaaaaaaatagttcagtgagagcacttagaaaaagacaacctgtaaaaatactgagatagaaacaggagacgttctgttataagaaggaactctgcatagagagagatataaaagaaaaacaaaccccacatgtatttttgatcataaagagtttgaaataaaaaaaatgtgctttggcactacataaaattcttccttgattatcacagtatgcaagattactaatgctggtccccaaagcaatcaattatttcctaactcctttccatggttccatttagtttactacagaacatcttctgattgtcccttttgcctgtttattatttgttagtgcatttccttatctgcatgtagctttaaaaagtcaagaacttcagacaccttcaaatttaatgacataacttgagaaaggaaagaattgggattctgatgcaatatgccttgctcatgaagatgttgctaacttctgaacttaagtaacttcctgtcaatagcatttcagtagcaaagattgttttccagataaacacatacctggaggagcagatcagaagtgggtctgactcgctgttggaataggatgcttagtgttcgattctgctgttccaaatcaaacactcttgttttcaacttcacacattcctctcttagatcctacaacaaacacatcgaaggaggaaaaagtccataactgaaagatgtctttgcatattataaccatattttatatatctcagatcattagtaaaaaacggtatttttattcttcaaagcccccagaagtaaatcacatacgttttcgtccacagaccattgtctgatagaattattatgtgcaaagaagaccaattttttttaaaaaagcaccttgaaatcagaaatgcattaatctagcatgctatttttgaagacagtaaatcttagcgatatgaagtcaatttaagtttccgcctatatattttgccttttcactgtctttataaaagcaatcatagagcacaaaccacaaggacaacaacagtgtttctgcagggaatagagatttgatgagctaaagaaactatcatttctgatggagtttttcattgtcatttgtgaaaacaagttgaaattctcggtgatggggctaatagagtcagtgatgcatttagcgggagagaaatagctccgaagagatggcttttaaaaggccacttgccacttgcccatcctctgaactcatggatttccataccttctggggctttctggtctcagtgctgggtaagaagcacacttagcccattctggcatctgtttggagcagctcttttgaatagttcaaacaccacagagaccttttccccagctcatggaggaagctgatgtactagaactgccttccaaactgactgcaataaaggaacttgcggtacttaaatatctatgccctttttgatggaattcaaggcagacgcagtagaataaaacccaaattcaaggttcttcaaaagctgacccttttctgcatttcaaactatctttcactacttcctgatgttaataaaaaaaaaaatgtcttctgttctcaccaagcagagaacaaaggtctggcgtgttgttctctaaagctctacgcattccttctaccttcttctcttttccttccactgccacttttccttcttatccaccttcttctttcagcccatatttggctctttgattgaagtacagttcaaactttatcacctctctgaccttttacctggcatccctcaatacctgctccattttctgaactcccatcagccctcaatgcctcctttgtgacggttagcatatattactctgtattcattttatcgtttgtgctctagacttgtcaattacacgacacatttttcaccagacaagctcaagaagatactgaaataaccacaccagcatattgctcttacattgtttttattccatcacctagcacaatgccacacatagtaggagcttaataagtgctcacaattattttgctaaaggggatgatgatggcaaattctattcactagtgattggtgtgataaagagcgtttaagtttctcaacacttctacttcaaagatttatgtattctgatgtggggcagctacctattgggcttaaggctctgcaagcaagggagagcccaagccacagttctgatgcctagggcctaaataggagtcacagagttacctgggcctgccataaccttgtatgaatctaatggtgaagttagatctcgctagtaaagccttctctgaggcttgatgagcatgcatcatcttatccagtagtattaattctattaaagggggcaaagaaacaggccaaggtatagcccactacagtttcaactctccttgccttttttagttaaatgggtaaagcttatgtatagggtgttttcaactgatcggtgcctacaaatggagagcagagaaaagaaatgtcatgttcagaatgacgtgcaagagtgcaagatccagcagggcaggatcacgagtgcacattttgtactcatgagcacacatgccatttggcagaggccattgtgaggacccactcactgctcaaattaaaaggtgcaacttcagcctggccaacatggcaaaaccccatctttactaaaactacaaaaattaggcaagtgtgcacgcctgtagtcccagctactcgggaggctgatgcacaagaatcacttgaacccaggaggcaaagattgccgtcagccgagatcgtgccactgctttccagcctgggcaacaaagtctcaaaaaaacccagtctcaaaaaaaaaaaaaccaaaaaaaaacaaaggtgaaactttctttatttttatttattttattttattttattttgagacagagtttcactcttgttgtccaggctggagtgcagtggcgcgatcttggtgcactgcaacctccacctcccgggttcaggcgattcttctacctcagcctcctgagtagctgggactacaggcatgtgccaccacgcctggctaatttttgtatttttagtagagacagggtttcaccatattggccaggctggtctcgaactcctgatctcgtgatccacccaccttggcctcccaaagtgctgggattacaggcatgaaccaccatgcccggcaaaacttgctttctttatttagaattcaacctctgtctgtgtctcatgctgatttttgttcttagcatgtatataacactctctgctcccaaacactaattgtttttagtactgctaattaagtagttaataagacttgactgtgaggcagataaatattaatagtacctattggatgggaaaacacaatcatcctcatttgcaacatagagatatggaaacggaagcatacagtgtggatatgcaagtaaaaggggacctgaaagcaatagtaaccacgatttttagcagcaaaactgagaataccttgaaagagttcttcagatgggtaaaaaaaaaaaaaaaagaaaaagaaagaatgaaagaaaaaaatcaatatactttatagagagtctttacacaagtgcccaaatttcaaaggccattagtattacttaaggtatggtaaaagttcattagtgggaacacaatttatcgaccctgagaactctctgttcatcactattggcacatccagctcagcacacagcagcagggaagacagaggctttagggttgtgacactgatctgatggccattgacaaacagaaatgagctgctctgaaaatctgtagataggaaagaatcgcttgcgttgtttttaatattcttattttcttcagacaagctgtggatcaccagtaactgatgccagagagttgccttcccaagaaactgtaaacaaaaacacccatgtgcccatgtacacactcataaacacaatcagaatggatatatataaacaactgttttgctaaccactattgtagtacctggatggagggggcagatggctgtcttagcttcctctatgctcccaacaggaacactttgacataaaggaatgcatgactgcatgatacatttaggctggatgcaagagcagctactctgaccctgccagttcagaggcaagacccagaacagcctccccaaggaaggctttagaaacaaaagaactctcctctggataggtgccatagtctgggatcatggctcaagggagaggctgtactatgtatcctctctcataatccttctttttcttctatgacttcctggcatgtatcagacctcaagaaagaacctcactgaaaatataagattgtgtcttcagataagaaaatggggacataacataaatatttatcatggaggaataatgccaaagatttgactacatttaatatcatgaaaaaaaaaaaggtacagtggtgtttgggttcaagaaaatactcagacctgttttccttgcactcttcatgttactatcaattggaaacagagacttaagagattacagctgagcaatgtgatacactggtctaatgggctcctgtgcatcttaatgatcccaaaccataatttctctggaggatccacacactgtaatcctgataaattccccctgtgcttgggctaaagatgattctagactcactgctatatagtacctataggagtacagttactttatgtattgaagagtaaaattgttatcagctctaggctgaagtacattttttaaaatgctgattgcttagaagcaggacatacactaacatgatcgctggtgtgtcattgaaaactatttaaatctgattttaccaagtaaaaatgacatgatagtggtatacctatttcagaggcagtgtctatcatgggaatacatggaattggggcttagagggcctgggctctagtcttcattgtccacagggccttgaagtgattgcttctgattaggtctcagtttcctcatctgtaaaccaaggcactgcacaaaattgggcttctgttcaaaacactgtatctctcactagcttcatgggatgtcttttcgagtgctgctttgttccctccctgaagcctaatggccaccaaaaccaccagcctcttttgtcataccctttcttggtggctttcactgatacatccttatctctgccccaaatgctaagacttttgtaacatgaaaagccacttctggaaaaggctggtcacatctcagactgatccagggcttcaacatcgaatactaaaaggcaagacaggtgacataaaagtctgactgaaccaggatactgcacaggaagtagtgagtcctgtggcaaaatacatactgcaagtctccaccctaaaagccttcggattaaaccacttataatgagggcaatggctaaacagttcacgtaactacagtcacttgagcccattaccaaagctagttgacaatctcaggattaaatactcaccaaggctcctggaaattggggaatttgggagttaaaaataagattgattttgagaaagcttgaccccaaatatatagagtcagttttactccacagctatcaaactctaaatgctcttcctgctacagaagataagcaatacttccagaagttttaggaagtcctgtggctaccctgccttttattttattccctgtgatcataaccagccgttggatttcaatccttcttttgattttcatggtatctctctctgtcctactgaactatgggggagaaaaacaagtgacagaatgggattgtggaggaagaatgagggagtgggtcagagcgtggggtttacagtgcaacagccataattaaagcaagggctctgccactgcctggcagttgaaactatgagcaaactttttttttagtcctacctcacggggctgccttgagaacaaaacgactttgtggatttaaagtgctgcatgtggggtctgaaggcttgtaaatgcctgctaaatataaacagccacctgataccacacagaccactgctagagaagtggacacggatggttcaattgcccctttacaggggaaataggaatttggagttttctcaggtacaagctataaaattgttttctgtttctgcctgaatggctggattctaccatacccagctttattccatgtcggtgaagaaaacacatcatcgaaatatgtgtttcctccaaagaacatgcagataagcctgagactgttcatatgaacgaaaataactgcagagaaaatgcctttcttccgtgttttgtttagtggcaaacaagcaaacaaacaaaaaacaaacccaaaacactgaagaacctaggtgagttacattttctgcaaatgtaattgacttaatgaagataaaatatatttcagataacaatatgaatttaacctgaattactgatttaattcgcacttgtagacttggacccatgatttggaggcatcaaaggaagaaaagttgggtttaatatgatcacttttgtattgttgttctaaaggggtacagtccattctcctaagggaatccacaggtttttgagataaactaaattacttgacgaggtacactgaacagaaactgctaagttcatggaaataattttttttttctatcagtatcagtagactctgttacttcaggatacttgtctgggccaattcatgatatgccatgaaaaatgtatttctggctgcccagtgaagagctgaagccacagcagatttgcctttgtgtcataactaatggcatattctaaaactgcacagtaatgcttattatttcacctcaaggatcttctggtgacttagataaatcgctcaagatttttttctgttttgtctttgctacctacattcctttttggaattatttttctcatctgcatttggagtacactgtatattttatattgtgctcttaattaaaaagaaattttagtctttttgcagcaattttacagtgcccataaaaactggaggcacacatttctgcagaacatgattcttttggaatctccaaaagcccccagcatctctttctgcctcatagtgtccctgaggtatgctatctcacagtagcatgtctttctgtgtctcactgcttaattgtaccaaggtagatttatctgtttactagttattacttggatttgtgtagctatttttttttttgtagctgacctgaagggtcccgttttcctttttatcgtaccaaatggcttccttgtctctttcctgaggcaccattaacaaaagcagccatgggaagtctttcaacagttgtacacagagctgcaataacactcccctcactccttaggtttgtaactaagtcagcatagagtttcaaacaggagaaaaacaatcgagaaattaaagccttagaaaaagaaaaagaattcaaaaatgttgaagcagcaattataatttgtcctccaatatctatttctcaccttcttccaaagtaatttcagctgggcacacacccagaacaaagacctctttgccgggtttgtttggtgtggctgtgtgagtaaggtctgttcacagagatgtatgtagtaatgtatgaaagcttttggaagtgtcctttaaaagacagctgctgtatgccctttatcatcttcatattcctcagcttttattcccttcctgatggctggaatgtgtggatgtgatgactggagctagcatagtccttttggaccatgaagtgaccttgaaaatggggccacattccatgaaatacagagatggaagctagggaccccaaggactttatggagcaaagttaccattcctgttcggcctacctgtcggtttatatgtgagaaagaactaacattttagcttatttaacccacctcattatggatctctgttgctcacaatggaacctaattctaactctacgtaagtgtactcaaatctatttatgcatgttagtataaaactggaagcagttaaaattatttgtagaaggaactgtgacattttgacagaaatagtaggcaagaaagtctagcaaaagtatcacaatgcctgtatcatagaaattttaaagaatatttaagtatctccatgagcagcagtcaacccctaataaaattattttcaattaaaaaaatcaaaatggcataaattattttgctgccatttatcacatcatcctgaatatgctgcaggatctaaaagtttcttttggagaagtctctatttcacagatagaaatcaaagtaaacaaaatctgagggaactaaaatttagcttctcagaaacttcatggccggagatggtaaacattccataaaattcactgaaatagccaaatttgggcaaaattgacctgcatttactgtctgccccaataatgtgatctgatgttgtctgcaggcagaatggcaaggcagcaaactcataggtatggaaatttcaggcacagtggttaccattattttatatgtaccacaaactattgcagtaactgttctacatgcttccttttgtagggtcaccacagcaatcccaggaagcgggaattgttattcccacattacagaagaggaactagggctcagggaaattaaatgacttccctaactcttgctgaattttagacttttgttaatgctgtccaaaagaagatactcgttttataggaattgggagaattcaccaacttattgcaagtttgtatttactaaataaaaatggtgggtttgctactcatctgggtaaatgaaaatcaccttcaaaaggctttctattattttaccgaaagtttggattttttattacaaattctattggtcactgatgttacttcatatgccatgtaaaacacaaacgattttcactaagtgaataaatacagaagtattgcatctatcaatcacaatttcctagcttaacaacatgagctccaatatagtcacaaaagtgccttgaaaagaacaaagtcagaaagtgacctaccttttgagtaagcagagcttgaacaacttggttggctacctttaaaaaataaagaaaaagttgtcatttataataatgagactttatatgcaccgactctaatttaccaataagtttctcgcagcttattgtagctaattagctcctcatttgcctctttcctctatatgcagagatctgattattttcataataagtctatccttctaggtaatattttgctttctccaaaggtgaccttgttgctaattaagatggttacacttaaaagatcattcataccttgactttcacatttccatatttggaaaaatgatatcctttcatatactccaagaaggctaaaaaatgatatagtgcaaaacacagtcctaattatctgtccacagtttctacactttgctgatttacaatatcctttgcctgtccttcctattcctttgctgtctatttcactgcttaatattacttgcaatagagataggttgaatggtctagcatagggacaactcattgtttcctatgtgtcctgctttcatcttcaatgtttttgcttaagtcacgctcttgttgttgctacctgtaatataatctggtagttgtttactacaacatccattttttcccttcttcctgagtaacaaacccaatcttttggggctgggcacattcaactgcatttcccagccattcttgtagcaaaatgttgccatgtgacaaaattctggccaataagacataagcagactattctcttgggcttacaggaagtctcaaagaagaagggggctcacccttcgtcttcctgactagaaatggaagtacagtaatggctggagcttcagcagctaccctgacaacaacagtcacatattaaggatatttggacagagaaaagcttggtcctgatgatgttatggagctgtactgtctattgaatatctatgtggtggaaataaggtagtcactgttattttgagtttcttccagcgaacaacaaaatataattcttagtaattttttcagggatctcattttcttcaagtatcaggcagcttgagacagcagaagaacctaaatccctcctcagcccaaggcagtgaatcttgattaatctaagccaatcttggcaattccagtgattggtttaggagtgggcatataacacaattccagctaaggaccacatgtaaaaccagtaacatgttcctggtgtttcaaatacctggcattttctccaggtaaccattcgttattactgtatgtatttgtgttaagatttctttttcatctgcatatttcaaaatactttgcatagagtcacctactaaacttcactattaccttgaagctatgtagctacatggctactgttgataaaattaaggtggacaggtgaactaggtggtatttttcagctaatacatacactgtaaacatttaatgtgataactgaaattgacagcatgaaagactaaatcagaatacttaaatatcctagatataaggcactctggttcattcatttcttccttcatttatccaatataaattttctgagtatctacttgcaaagctagatgattgggccatggtccttgacttcaaagactcatacctggcagtgagttggcaaaaacacaattataacacagtgtgacaaacatctaatcatcatggtaattcttacagtcaacgggagactgagggacacttttgtgttatttttctcttggtaacatatttgtttttggtggtgcccaactatttgtgcttctttctctatctagtatagtcgaacagattatagtaagaatgtttccatggagcttaattgttttttgactcaatactggcaaatagtacatccttcacaacagctggctaccagtaagtctcatagaaaattaaaacacaggctgtcatcaacttttgattagaaggcaatcacaccacaagcagtaaaagactaaaatcagattatctgtaattgattagttaaattatatgcacaagaaggatttttttcccatcagaagtcttttcaaagttacattgcagacattaagtaaaaaagaaaggctcttcattgaaactatgattttaaataaaatgttttcttaggtattgtttttgagtgaagcacaagttacagaactaccacagaccaaaataaactatactttcattaactgaggccatatgttcctttatcactttatttatatgtgatcacaacagtgataaatgttatccaacccacacaaattgaccaatagcataatagtgaaagtcagttttccagcattcattccaattcataagtaactgagaattcaaagtcaaactacatatcatctattttattgttggcaaataaacaaaacaaaacaaaacaaaacagaagaatcgaactattcatgcaggttgaatcaggaacaaggtaccaaagttaattcatgccataaataatttacttcttttggatctcaaactttggatttgatttacattctcataaaactgcccaatatcaatattttcttttctttctcccaattggtctctcactgaaaccattctggtaacggtggtcacataaaatagctctatccatgatttatcaggagacacggactaatatcctaactctaacagcccacaggaggaaatatgttatatctcacaatccaagcagttgccctataggcttagagactctatatctaacacagttccttctggcatgtactttggaaaattatttgctcctcttgaaagctgaacaaagatacacgaatgccttatttctttacctactgacatgaggttatattacctagaaggactcactgcgcttctttgaaaaatatcaggcagattatagacatgctttcctccatactgtctataacgacagtgtccgaggttttgttatcgcttttaacagctaacttccctgatgcataaataggacagctgtttggagtttgtgcctgcaacctctactaggctcaaaagataatgcctggaatgcgtccctgccctcaagctaacattatgccctaaacatttgggttgcaaataatcacacacccataggcccagctagtgagaacaaatcacttccaatgtcatctgccagctttcctctccagagaaagggcagcagctgtgctaggctgcaagggacttgaagcacactggaaaaacaaagctggcagtccttaagccactagcttgtagtacagccttccttaggctgtccatggaggcctctcccctttgctcctaggagatggagcagggctgcaggtgagacaggaatgccaaggagagcgcctgagtacatctcgtgtttccttctcagtaagaattttctcagacaatctagctcctctaacacatggctgatcttctactcacacaaaactttgctcttcttccctgaaaaacttccagggctcgtgattcctccatgcactctcttggaagtgggcgagcagagggaggaaaagctggggctatggagttctctattattttattgaaaaacagtccttgaagctgaataagaagccacactaagcagtttattcagagagggagccaattctcagccaagggctggggtggagggtggagaagcttcaggtttacgggcgtggggagcgaggatctccatgctctatgctttgacagtcctctcctggctagtgggcttgctttcatatcttcatgagctatttcaccatgaaaagccactgtcatgtcaacaaagtaactgaaaaatctcatcagaaaaagtatgtgtttttgaaaatgtgctttggagaggtgttctatgcttctgatcttggttgattgtactgaggcagctaggagaaagcatggagaatatggacttgggttaaaacagtgcctatgttaacctcatacactgacatgcgcaggggatgggagagaaatctgacttttctcagccataaaataggggagctgcctacctctaaagttgtgaaaaaggcatgagatgatagacataatcagcgaaaccacctaggacaggacttgatataaagccgtcacccctaaatgtgaatcaggccagttgaacttcggaaaatataatgcatgttcaggtaagcagttaagaaaaaattattttattttattttattattttgagacagagtctcactttgtcacccaggctggagtgcagtagcacgatctcggctcactgcaagctctgcctcccgggttcacgccattctcctgcctcagcctctggagtagctgggactacaggcgcccaccaccatgcccagctcattttatttatttttttgtatttttagtggagatggggtttcaccatatcagccaggatggtctcgatctcctgacctcatgatccgcccgcctcggcctcccaaagagctgggattacaggcgtgagccactgcgcccagccgaaaaaatgttttttaagaataagggattctacttggaaaggcgtgaggggtatgtatatgtgtgcgtgtgtttgtgtgtgtgtccacataatatacatgtataaatgtaagtcactaagcatctgtattattcatttactttgtgaaacaatcctgtaagatagaaacaagaaagaaactcgaagaggtaaatacacagccccatacaacattggaaaagggtgaacagtgaaccctagtctgcctaatccaaagcccatgaagttctcttctaattcaaatcagactatttgaagtgggtccactatttttttcagctgattaatctttggattattacttgggttagtgcataataaatgagtgctcatctctgaagagataactgaagaaattagtgtaaatatatatgtgggatttggggaaacactaatttggaaattaatttcctgctgatactgtccattcattcatttagtcattcaacaaatatgcattaggcacctagtgtgggccgggaatctgctgggtcctgcaaaaataatgaggaaacaaatacagggactgcctccagggcgatagaatctggagcaaacaaggagtagatcatctgtaatttccaagaaatgagtattttgaacatatgaaagtgacaagtacgatcgtcttccatttctttcaagaccttgatttttttttttttttttttttttgagatggagtctcgctctgtcacccaggctggagtgcagtggcgcaatctcagctcactgcgaccttcacctcccgagttcaagtgattctcctgcttcagcctcccaagtagctaggcctacaggctcccaccaccatgcctggttaattttctgtatttttagtagagacgaggtttcactatgttggctaggctggtctcgcactcctgaccttgtgatccacccgccttggcctcccaaagtgttgggattacaggtgtgagccaccatgcccggccaaaaccttgattttaaagatgacgtagggcccagctgtaggatatgcctgagagtgtcctgggaatgattctacaatctaggctaggcatgtagcatgtggatcagagagacaggtgagaaatagtctcagcaacctacttccacccttacttaaaattctatttttgtctatttctgaactacatccaaaggcctagttttcaatgtccttgcgctctgaagtgtagaggttggaaaataactcaactccaccgtcgtcactgactgtaagggcccagctctgattggagaggaagaagcagtttctccaacttttcgtgcagaagctcctcctggaatgtttgtgaaaattgccaatttcctgtccctgcatactgattgggaaggtctgaatgaggtctacggatatgcaattttagcaaccaccacacatctttctgatgcaaagggctcccagaaacacaccttgagaaacactgggatatggtttattttattttattttattttattttattgcctgtagctttatattatctcagacattgttgtggaatcagaagtactttaaaacttccacatgggtctgtgctcttctgttactgtatctaaacttggtggagggagctttcatccttctactgaaaatttctgaaaatgctctctacagcacagcattcagataatctaattgtggtgttcttaaccccaggtgaatattataatctcctgtggtgctttaaaaaaacagaaagcccaggctccacccaagagcagagtcagatgggaatctctgaggtgtgacacagccagcagtatttttaaaggtccccaggtaagtccaccaagcaggtacagaggagaagcacttgctgttctggatctgagacctcacctgctgcagcttcttctgctgaagataccctttccaattctgccccctcctctgctcacctacccgctgctcctcctgccctctggtgactgcattctgtgtttccaaagtcctcagtgcagctcatttgctctgtgactttctctcacctccctactctatgactgtccatcccttgcacttctcctgccaggctgggagtgccgtgaactcagggcctgggtgaggctgacatccagtaaaggtttgcaggatacaacggaatccattgaagtgccatgcagtggttttggatgttattttacttattttacttctttacatgggaatagtaggtatgaaagaaactgtggccaaggcaatactgtgaataaatagcaagtcattgctcaccactaagtgtctgtcaaacagctagactaagaaacctgattctaacatgcaaacctccaaactctaagattaatccttgttttttcctttgtactgcaaggctgagagatgagatagggagcagtagcggtgaggatgaagtgtatgcaggcacacctgtttgtatacaggtgtgtgcgcatgcatttgtaggtgtgtgcacttgtggatgtgcatgcctagcaagccagggtgtatgtgtgtgtgtgtatctaggaatgtgagtctgttaccttctgaataaatgtgctcttctattggaacacagattctcaagtgttttccccaaatcctcaatatgttcctcatttcccagaaaataaccatcagtgcaagaaggattgaagaacattttgtttatttatttgagatgaggtttcactctttcacccaggctggaatgcagtggcaggattatggctcactgcagcctcgacctcctgggcccaagagatcctactacctcagcctcccaaatagctgtgtctacaggtacctgccactacattcgcctaggttttatgattttattttttttattttgtagagacagagtctccctgtgttgcccagaccggtcttaaacttctgggctcaagtaatcctcctgcctcagcctcccaaagtggtaggattatagatataagccactgtgcctgtctgaaaaacattttaaatttacatttatccacctgtgtatgtttgatgacacccactagcaaggaaaaaacttacataaggccttaccttgttagtttgtttaattagcataaaaaaccttgaaaagaatttccagttggcattattactacattcaactaccccattgagagtgttctcttacaatgtgtggaaatggattatctaccctcatgtaattagttataaaacaacctgcatgtgtaatcaggggtcagtattcatgaatacaaaatatgtgtattgcttagaggcagttctttgtcacaaatcacctctttggcaacagttaatttttgcaactaagaacagaggaacacgccctctaaaaagtctgtcttcagtggaaactttatatgaaatgattttgtggataacttatatttttgtcccacacattctgatgaaacgtacggagtgcaggcatgggaaacacacaaaatacagactatgagtttccataaagaaatgtgagtgttttgattgacagggagggttgacctacgggagaactgggacagtttctgtggtgtgagtcacataaatctgacttctaaatacagataaaatctcagcagaaatttctgtgcaggaggttaaagtgaaactttgctaatcaatacatatgacccaaaggcatggtatgttcctttaaatatccttggatctgtttggtctttcttgccctaaactttgactggaccacgagcccagggagcagtgagggctgctgaactggcctcactagactctgagccatgtcagagtcaactaactttagtgtttaactttggacattgtcaagattattctggtcttttaaggtcctgacagggcagagaattgcaaataccattttgcttgagtaaccagtgtatgtggttgggaatattaaacaattaacatatctaatattaaacaaataattttctgaggacattttgagagttcttcaaccacatataagtaaccaatacaaagtggtatgatgatgacagtgtctcaaactatcaagtgcgccagcatcatcgggagggcttgttgacacataggtcgctgagccctaccccagagtctctgattctgtaggtctgtcgtgggtcctgagaatctgcattcccaatgaggccctaggggaggctgacgctgctggtccagggatcacatttttaaaaccactggtgcagggagactccaaggactactggacctcagaagagagagactgcttccagtttgaagggaacaagagttatatacggcgttactgctgggagctgagcatgtgttccttatagatcatcccattgacttctgagacagtgcattggaggagaggggaatggagagggtaagaaatatgaagaggagtttgttagaagagatttccctcatggatagtagggagaaaaagactgacgatatattggcagttcccactggaaaggtactggaaccagacgaaatgcagttcttcttttctttctaaaatctgcatcaggtacattgtaacaaatctccaactgaattactcagaccacaataaagttttaaggtgctagacagatgactaaagaagtgatttcatttaaataacaactgcaatcactgacaggtcctaggtgagaacttgtcagggagcgaatggccaatcgtggcagggagagacaggatgcgtcggtgattggtgtgagccctgatggtgtgaggtgacagcgggggaggacgagggctctgagcgcatgtctgttttctcctcacctcccagaaactctcaaatgcccattatctttgccatcatctcttcattatcatcacgtaatatttatccagtttactcatgcgtatagccctgtcttcttccattctgctccaattttcttcctcatttctctttctcttcttggcttgttctgaatctactgatttttttccctctggttgccaactgtgaacatcatccccacccactctatcaaggatttgctttttcagaaatggtatccaactggagatgcagcatgccccgacatggttcttctcattcattggaagggatcacacttattggacagaaataatttatcatgcagtaaactgtggcccaagaatatgaaacaacaaccaaaaggaatatacagatgcctggataaggaattagggagggaggggggcagatacacacacacacacacacacacacacacacacacacacacacgcacgcatacacacacacacaccgcccacacacacacacttccttttcaatggctacatgtttactacatttctttggaggagaaaatgctgatgttttgtggatactggtagcacacacacattttgagatcagattaagggaatcccaactagtccagccttggatcaggagcctctccatcccccttacctcatcaagacatcgctcatattgttccctttgattttcattctccaaagccaacgctgaattctctgcctgcagtaagatacaaaaataacacaaataaatcaatgaaatgttgtgttatgtgacaacttattccatacagttactaaatatatctcctcgtgatccaaaacaatcttttagaagtacctatgacaagttcactctaagtactattataaatatcgcagggatgacttctgtcttaccaacttgctcactaaaatacatgagaacttaaagaaatgcaaaacttgatattctgaacaggtagaaaatcaaatcatggtttgatgtgagagtgttccgtaaaaagattacaatgtttattttattctgtgaaaatgtaaatgggagaaatgccttaatccacttcattaaggcccatcacagactcacagacttatatttgtttaggccacagaaaagaatctcacataaagtcatgaaagcataattccaaatgcaaactaaatatgttactttcattgttagtcaatgacttacgtacataagataatgagaaatgtaagacttgaactatacttaagcatccccttccccacactcttgtaatattactgctttctcgctccttagagccatgtgggtatgtggttgaatatggttactaggttgacatgtagaatagtaaggggaaagaaaagtaatcactggaagcttattaggttttagaaggagcgtgaaatgctgatatgaagctgccctccacctcaggtgacctggttccactgcaggttcctgtctgaatcttcaactgtgccagtgaacccttcccagggctatgacaatgaccacccgctctaagcccacaagcaatcttggctctacgtgccccttctctaaaatcctccttgacatttggaagtaggggtatagtaatctaaatcagtattttcaaaattatggtatgatttttaggtggtacacagatcaacattttaacttcatagttttttcccatccgtttttctaaaccttttatttggaaataatttcaaacttatatcaatggatgaatggattatggtatgtatacacaatgaaatactatttggccataaaaaagaatgaaataatatcatttgcagcaacatggacagaactagaagtcatgttaagtgaaataatctatgcacacaaagacaaatattgcatgttctcactcatatacaggagctaaaaatgtggatgtcataacggtagagaataaaatgatagatactagaggctgggatttggggtaggtgcgagaggggatgaagagacattggtcaatggttacagatataagttagataaaatatatagttaaataaaaggtgtaagttctattttttgacagcagagtagggtgactatagctaacaacaacgtattgaatatttcaaagtagctagaagagagaacatgaagtgttactaacacatagaaatgataggctgggcttggtggctcacttctgtaatcccagcactttgggaggcagaggcaggtgcatcactagaggtcaggagttcgagaccagcctggccaacagggtgaaaccccatctctactaaaaatataaaaattaaccgggcttggtggtgcacacctgtaatcccagctattcgggagaatgaggtgagagaatcacttgaatctgggaggtgcaggatgcagtgagtggagattatgccactgcactccagcctggaagatagtgagactccatctcagaaaaaaaaagagaaaaaagaaatgataaatactcaagctgatggatgcctcaaatactgtgacacaatcattatacattctatacctgtaacaaaatatcacatgacccataaatacagaaaataatatgtatcaaaaaacaaaaaggatagcattaagaacctcacaaatcctttcctaagattcacaaattgttaacgttttgccacatctgccatatcgattcctttccatttcttttctgtacctggaaagtaccttgtagacatgatgcattttattcctaaatacttccacatgtgtttcctcataacaaagtcattgtcttgtacaatcacagtatagttgttaatttcaggaaatataggaaatataaatacagtaccacaatgtgatctacagttcttccagtttcaccaattgtcccaataatgtcattgatagcaatttttttccagtatacaatcctacctgtgatcatgtactgcattcgactgtcattgccattcatcaggtaatctctaatccggaataccttgccttttatttatttattttttttgagatggagtattgctcttgttgcccaggctggagtacaatggcatgatcttggcttactgtgacctccacctctcagggtcaagtgattctcctgcctcagcctcccaagtagctgggattacaggtgaccaccaccacacctggctaatttttgtatttttagtagagatggggtttcaccacgttggccaggctggtcttgaactcctgatctcaggtgatctgcccgcctcggcctcccaaagtgctgggattacagacatgagccattgcacccggcctggaatagtttgtctttttatgttttttattttcttcttcccttcttttcccccttatttcctcttcttccttacctttctttttttttttttttttcctttctgagtagaggccagttatgttgttgaacatcccttaatttgggcttctctggagctccctcatacatatttggtggaaacagtgcacaggcaatgctgggcccttctcagtgcatcatagcagccacgtgacatccatgggacctgctgctggacatgttaactttcatcacttggttaaggtagggtctgccaaatctccccactgtaaagttactgattctcctcttgcaattaataagtaatttgtggggagatactttgaggctatgaaaatatcctattgctcatcaatctttcacctacctatttaagcaaccatcaatgatttttaaccaaatcattgattaccttggttgcatatggtgacttctaactccatttttctatctacatttatgagttgacattcttccataggtaagtgattttcctatctgttagtatgaaaacatcaattctgataattttgatgttcaaatcactccagctttgggcaggtgagcccctttaagctggtgtctatatccttttgacatgtacccatcatttcttaaatactttctttttcagcaaaaagagatgttctaggaccatcttgctttttccttgcttcaatccctgaaatcaggcatttctctaaggaattctacttcctcttacttggggaatgataattgggaactaagatctgggtgttagcctgtatcagttgctaccaaggagtcactgcttctagtcgctttcagtggaaggatttttccacactcctacatgcacaggctcaacacccccaccccaccccaagccctacaggattctttcgtatcttctccttttcatattagtatcttcctttttgtatggttagcactcaggctctcagcattattttaactcctttgttcaatcttaccatgtgtacaaaattggtacgctacccaaaccagtgctaggaaaagttcagttttgtgtttttctttagaacaaaagtataaagtaaaaatactgtgttccaaagttactaagttggtttttcccctcctccccttttagtgtgtttatattattcatttgaaattcggttcagttcatttgtttctgatagtattcaaatttaatttcctctcttcttaattacattttgttttttagaatacataaaacattaacaagaatccaaaagttaaaactatattaaagggtatatattgagtgcagtgtccctccctctcctgcctcgttcctttctacctctcgaagattctttaatagtgtcattatcccttttttgtcttcctctgttacttttaaaatcatgtcctttggccgggtgtggtgattacaggctcacacctataatctcagcactttggaaggacaaggtgggaggatcccttgagcccaggagtttgagaccggcctgggcgacatagtgagatctccatctctactaaaaataaaataaaataaaaattagccaggtgtggtggtgcatgcatagagtcccagctactaaggaggttgagtttggaggattgcttgagccccaggaggtcaaggctgcatgagctatgattgtgccactgtactccagcctgggcgacaaaaccagaccctgactcaaatacacacacacacacacacacacacacacacacgacacccaccatgtcctctgactccctcctattacatatccaacaatcacctttcttcctttctctccttttttcctgctattttattagttgcatacttcctactttgccagggtatatcattttcacacaggcttcttccacctttgcccccacccttggtttggtctccttaatggataatggctggttggtcttatgttcttttgcttctgtagcaaaagaaattgctttgaaattccctcttttccttttccccttcacaaccacgtctccacactgcacctcctctttcccctttatctccttctttcccggcaggctgcctctctgagacagccacctgggtctgctcactttccagccttgcccaacagcccactggatctgccacgtgtccacctgtgtgcagtgctggccttgggctttctcatttcctcggtgccctctgctttccatctccctgggcacacacgctggcagcaggagttacatgggtatctggtatttatttttctacttacagtaatttgaaattcaagtgttctctgttattgataatgcagaaggcatgggttatatgtggttttatttgtgtttcctggtgatatgaatgtcttctttggcaggtgcttgaaaagtttcaactgtaggctagtttgttactttaatcaacaatgaaacttaggagaaatgattgaaccagaatagggcacaaaaatgaggaaaactcccggaaaaagtctgtttgagagtgacttgccattttgatcaaggtcaggtcatttcaactcagtcacggttcacattccagaactcctcaaacactgtttcttcttcaggttacagttttgatccttggctttgaccttgttgctctggggctgaatccgttttaacaaacctgtgaacaccccagtccctcaggtgggatcctgccacgttctttcaggtctcataatggacagacatctgccacacagcacgatccttctgtgctcaggctgatcatccgtttgccctttttaagcacagttattggttattcccagactgtttcttctcttcattcttcaccaaactaaactgactttgctgttcccttcagggattgcttttggccagtcccatggaagcttttccgtctctgcagctgagatggaacccctcagttcctcctccagaccaaaaggaagagcaggctccggttccagttccattctgttgcagtcttattaggcaatgccatcttgagtaacttttagcaagtcacttaccattgctgggtttataatttcttagttaataaacaaagatatccaacttgccaatctaaaagcgatttccagttcaaatatttggataccatgaatcacggaggaaaatgctagaattccaattctacaaagtcatgatttctttggagaaatttaccttttgtggagtctgctgattttagtaagccagcagtacaagggataatgggaagagagataaaggagagaactgcaaatgccacttcacactgtttactttaaatgtcttggaaaaaacatgtatggaaataaagctgaaaatgggaatttatatgggatatctacacctcgctcctacccacaatatcacgttgcaaaaacactgcaatcgatccattcagataattaccgtcattataccgtttacattacttgcctcacgtttactgctctgacaatctattactgccaagcaaattaaatacctaaagggtgctggtgaaagcacaatagtcacatttatggttactgtgttcagttacagagaccaatttaattgatgtaatcctacatatcccatgggacaaaaaagatattaacaatcatgctggtgaagttaaaataatcttgaactgatgattttctttaatccatttgcatttattagagattcaggattaacctgctaccaacttaaggcaacagagaaaaaaaaaacaggaaaaaaaaccctcttaactaaatgtgatttaaagaaacagtgaatatttatatagcaggaatgggaaaggataagcagagagggaaaggaaagagaaaatgcaagtgtcactattaagaattacagacatcacaatacaggtctttttctactttaaataagtatgttattaaagtcaatatgcccagaggatgcagttagagcattcaagtaaatgtaacagtgaatctttgcattcagctttgtcttccacaacaatcaaaaacttttgctagacttagcccgggatttcctgctcagcgtggtttccccatggctccaaattatagtggtctaaatatgttcatggtttcatctctaaaaatccttaaatgtccttataaaatcaaagagcatcacagagcaaatccgtattggtttggtttactgtggaaaaggggtttgacttgatacgtaaaaggaactgtgtttcttagaggtcctgctcagtgaatagataggctggctggaacttacgaatgattgaaaaatctgatgcttctaaagccactgtcctacattaattctgtaagtatgtattatgtttaaaatctttgtatactataaatttgtttaatagatccttttccacagaccaaaggtagactactagctctacacaaaaatctgtcctctgcataacataacagctccgctgcaggcttttcacctcttatactttgtctccactcacttccatgaccttatatatctgattctccacagcacacaccatctcaagagtcaggctcagctcctaaagctcccatgctccttcctgggctgtacctttggttttgctgctctagcatggaacaagctttactctcccattggcctttctaaatctcactcagttttggtggtctggctcagatgtggacttgaaatacttaaatggggacacctttaaattaaaaaaataattggatgtataaaaatgtagcaaaatattgcaaagaattcccccacaccattcaagagactccccaaaggttaactattttaccacatttgcttatcatttaatactatctatacctggagacaactttttaaaaacacttgagagtaagatgaagacacaatgcaatgtccttttacctcttaatacttcggcatgtacttcctaaaaatacattttctatataaccactgtgtagttatcacattcaggaaattaacattgatgcaatagcctaatctactctacaggccttgttcagatttttccagttgtccctcaggtgtccctgtctagtccaggatccaatccaggttcacagagctgcatttagttataatttctctttagcgtcctctcatatggaacagttcctgaggtgttgtctttcatgatcttgatacttttcaaaagtataggccagttattttgtagaatgtccttcaatttgaattcgcctgatgtttcttcatagattttaatatttatggcgagaatatcatggcaatgatattgtgtccttcttagtgcattgtatcaggaggcacatgataccaatttatcctattactacaggtggagtatctctaatctgaaaatctgaaatgctccaaaatccaaaactttttgagagccaacatgaataaagaaatgtgcaatagagtcttttagattttggattttcagattaggaatgctgaactgggtaaatacataatgcaaatatttcaaaatctgaaaaaaatcagaaagttgaaacacttctggtcctaagcattttggataaagatactcaatttgtatgttaaatttgatcacctggtgaaggtggtatctgtgacatttctccactataaaattatttatttccttttatcaacagtaagtatcttgcggcaaggtacttcaagatatgtaaatatccagagtctttgagattgcaaatatgcaaatatctaaactttggttcactcctcttagtatctattggtaatttttttttgactaaaacaattatgactgtggtggttgccaaatagcgacttttatttttattttatctatcatctatctatccatccacccatagcaacttttattttatctatctatctatctatctatctatctatccatccatccatctttccatccatccatccatccatccatccatccatccatgttggtgcaaatgtaattgtggcttttgccattacttttaagggcaaaaactgcaattatgtttgcaccaatataatatctatcttgttacctcttatactttgtctccactcacttctatgaccttatatgtctgcttctccacagcgcacaccatctcaagagtcgggctcatctcctaaagctcccgtgttccttccagggctgtgcctttggttttgctgctctagcatggaatatgctttacactcccattggccaaatagtgactattggctctgtcacccaggctggagtgtagtggtgtgatcatagctcactgcatactcaaactcctgggttcaagtgatcctcccgcctcagcctcttgagtagctgagactgcaggcatgtgccaacatactccactaatttttaaaaacatttttgtagagataaggtattgctatgttgtccaggctggtcttgagctcctggtctcaggtgatcctaccacctcagcctcccaaagcataaatagtgatttaaattctactagtcttcctgcatttgctagtttgaaccttatcacaagtaggggccacacattttagcactttattataatgccttcaattgagatgagtagtttcatgagtattattagtcttctccagttagactctaagccctttgagacagggatcatgctttatacgcctcttttcaaaggagtgagatgtaaattagtgtattttaactatagctatgggtggaaatgaaaattcagtttgatatttagattcacttagcatcaatgcgtttgttggcatggaatatgtacttttacctatgtcatctcagtggtggtcatacacacatgtggatatatactgatgtatcttttaaaaatattatagacaaatgagaaattaaaccagtgataaccaacttttcccctttgcaaacatcaatataaatttgatttattattaggatgtctatattttttcttctttcttttttttgagacagggtctcttgccactcaggctggagtgcaatggtatgatctcagctccctgcaacctccacctactgggttcaagcaatttctcccacctcagcctcctgagcagctgggactacaggcatgtgccaccatgcccagctcatttttgtattttttagtagagatgggacttcaccatgttggtcagcctggtcttgaactcctgacctcaagtgatccacccacctcagcctcccgaagtgctgggattacaggcgtgagccactgcaccctgcccagtgtgtatattttcaaaatgaaagatgaatatacaccatctgacacattctgacaactgacaaaatatttaaagcttgtacttcgttatattgaatagtagaggagactgaggttttgcccctcacttataaatgttaactgcatttattactagtattgttgtagtagtagattaaagatggttgcaaatgctctgtgacttatcttcttgaatctagactggccttactgacttgattgaccaatggaaggaggctgaagtgccatctttggtcttccaagactacaccatgagcttttaagcttctacctggcctcttagaacacttcttatatgagctaccatgtaggcagtctgaatgttttgaggtggtataaagccccagctatgcagacaggccctggaggatgagatgccttgcagagagagataggccaggggacactgagaggccagccatgggagtgaaggagccatcttggaaatggatcctttcacctcccaacatcacatagattggagatgaactatccagctgtgtcctccccaaatttctgacccataaaattgtgagaaaaattaaattgttattttaagcctcaaagtgttgagatagttggttacatagcaataaataagtggaacagtcatattcaggaaacgaggtggaacatcaattcttttatgtgtacattcaattactggtcctttgctgtacctgcaggagctatgctgggggaaaataaagatggataaaatatacaggggccaccataaagaaaacaatagtctaatagaagaaacaagttaatttctcacattgaaaactacaatgcaataggatcagaacaaaaaaaaaatcaacaaacttcagatgaggtaggaaagaggtgaccgacccttgaatcagtctactcaacaggcaatcaaaacaatgacaaaggtgcacattggactaaataaaaataacacagttttgaacaaaatgccaagaaaatgacacctgacttgtattcaaaaagcacattattcaaccaggctagaatcctggatgtaaatattgtcaaattattatgaaagcaaataatgtcagacactatctaatacccactgcagagaaaaccttgggttcaacaatggcaaaaaaaataaataaataaaataacaaactgatcatatgcaaatgaaacaggtagaaatgaacagggttgagtggtgtggaggaaagaaggtggaaagaagatgtcctctgaaggcaaaaagagagagaaagagaagaaaacgaccaattcacagtagttaaaaaaggctgcctccctgtggctttcccacggcaaaagctggtcttttccagagtgacatctttcaagcttgctgaaactccttcaattcaggaaaggcagacaggtcagaataagatcagaaaaggtatttctctaaaataccaattcaactcatggtttggccccataggtaagaaaaggtgcttctgtactttattttctctttggaattttttccagccaaaaatgtgctgctttatgatggccagcctgtgtcagagtcctgtgccactctacttaaataacacacttcacaactctaggccatcccaacaatttcatttggggaggccaaagggctgtacctgcaggagctatgctagggggtatacaaagatggataaaatatagagaggccaccataaagaaaaaaaatagtctaatagaagaaacaagttagtttctgacagtgaaaactacaggcttccaagcaaaatacacaggtccccaaaatgttcctaattcccctgcagtctgttctgttttgaaagctgtttaaaaacatcctgaggaaaaagtcccaggggagtggctaagcgtgccagccaggtgagtgcattttcatctgctagagtgatataaagtctgaatacaaggaacaccaagaactggagctggaatattgaatccccttccctctatgattataattcaaacttacggggtttctgaatcactcatcttatcacacctggctgccatagtggccatatgtgtagcgtagttggctaaagggtgttccccactgattgtatttgagagcttgtacagtatccagacccagacaatgtctagggctgctgggcatcttggaggcaaatgttatcatcctagaaaatgtcaataaagacattaagctctgaccacctacagagaaacaaatacgtgtacccatacatgtgtgaaggcatcctcacaatgtccttattcttggactcaacccattaggtttaggaccagcacaagacactaaggatataaactacattaaaatgaagtctttgtttaaaaaagttgaggagctacgccgtgagaagatgtgatgtagaacctgtccacaggttcatttttgaagagttgaatagaaaacacttcataatgaaacctctgtgtacttctagaatttaaacgtttggatggggcttcaggccagtggttggaaacttgagtgtgcattggaatcacttggggggttatgggatcacagactgtgggggagccaccctcacatttggattcagggcacctacagtagggtccaataactgacatctctaacaagttcccaggtgctgctgctggcctgggaacagcactttgagagctagtgctcaagatggatcaacttcagggtgaaggtgggtgtcacctccttcttcccccatgctgccattgccttggaagcattcagaagtctcttactgcttctctggaactggggggtggtaaccacacaattttatacttttccttctcttgttttgtttatgagtctgcctctctctcctacatcagtgactctcattgggagaaaacagcctaagggcatagatcagtgtctctctgtgtgtgcatatgcatatgggtgagtagaacagaaaaaaactgtgtgtgatttggaaaaccattatttgatgctgcattacatctggaaaataataaacggtaatgctttcatgatacaagaagtcagctcgataatttccttgcccagggggatatacagaaaagaaatccatgcctggagtgcgaaggcaagaggagtggtaaagcagatctatcttcctaggaggagagtaagataatctgatgggaagtgacggcgtgcttttcaaatttccttttatttgaaatggatgtaaaaataaatgtctgtcactgttttgggttgaatgagatgatgaaggcagaatgtaacgaacatggagcctggccctctgtatggtttggtgaatggcagtttccttcagtcttttgtaaaacagctcccatttgtaaccacggccactcacaggctttaatgcagggggtggtggtgtcagccaggccagaaattgtccctgctgagggagagattttggccaacagaaatgtaccatgggtcctctggattggacagtttaaacaggctcacatacagattagcgtcaggtcctgattcttttaacccacagtcttcctctctcaccctttcttcttctctttctcaccttcttacttctgcttccagatgcccatttatcaactcattattacatttatcaactcaatattacatatctgagctcaagatacaacacgtattttccaattatgagagaagctgaaattttagggactccaaaatttctttgtaaaaacaacctttaaaccttaaaacatattccatcccccaccaccagatgtgctttcagagatacaaatctatgactttcaagctagggtggactagagtggatttttcggttttagaagcctcacagagaaatttcatggagctaaaaaatgtaaaacaatctgatcactctgttgagtagagaatatttgtggcattaaccaccaggtattttagaagttaaactatgcaaaactcattgactgatttgcagaaaagaatatcaattaatatattgactttattacctcatttaattgaaggcccccaaactctgaggtagataggatcagctccattttacagatgaagaaaataagagactatcaatataaatcctttgtgttgcagagatagtttatttatatacacagtccttattccttactaaggacttaatacagtactttgaagaaaaaaatataaatgacaatagcctgataaatgcctaaataccagcgtgtttgaaccctctctaccaagaagcaggtaattcaggtcaggaaaaagactgagaatttctctagaaataggaattcttgacctctgatctataaaaaagctgaaaaaaaaaaaaaaaaaaccagaaaggaaaaaagcacagacatagtcattctaggaatcatttcatccaaaagaggaagccacttataaagcaagtttaaacaacaacaataccattacacaccaacccaactggtgcaaatgaaaacatcttacatggcaagcgttggtaagaatgtggaagaacaggcacactcatgtgccactggtgggtgtgtaaattactacacccattttaggatactttggttcaacttgctgatagagaagatgctcatagcttctgacccagcaacgccattgctaggtataacccctgtaggtacccgcaaacacatataccagggtgggtgtacacatgggttcacagcagtcttgttttctagccctcagacagaaatcatctaaactaagattgacagtacaatgaataatttttattaatcaatttatataatgggatactatatagaaacaaaagccagtgaatgagaactgcatattgaatctggcaatgataacattgaatgaaagaggcacaacatatatttaaacacacacacaaaatcttccaacatgattctacatacaaagttcaaaaactggaaaaattaaattatattgttaaggatacatacataggaggtaaaccatattctttcaaaaagcaagcaaattattattacagaagtcagattcatcattaccactagtggggagaaaggaaactgtgataagacaggagcccatggggtgccctaggctactagcaatgtttcatttgtggacctggtggcaggtactcaatgttttgcttcattattttttaattataaatatacatttttgggcatacaaatgtgcagtcttctgtaaacatatttcacacacacacacatacacacaaatgtacacactctaataagtaacagagccctaggagagggcctgaaggaaaattgtggaagggccctggtgtacccgggcatcccgctgccactgtaatgggcccagcaggtggacagcccatgagatgagagagggaagacactgaggcggatggagccagttgctgaggcaaagggacgggaccaaatgtatattttaaggaaggaatcctggcaccagcaacaaagagcgatggaaggggaagatggggagatccaaagcatgctattgtagcattcctttcaaggatgacctactcctgaaataaaacagcggcactgaggcgaggaagacctacatttgagaaagaattcagtacagattcatcagctcctaaccagtacctagatgagaaggagagccaaagacgacactgagttttatattctgggtctccgccagggcgataaggtctttaatagaaatgggtaacaaagtgagataaagtgccatgggagatttttagaaaaaaacctattgccttgccatgtaatgacttttttttcttttcctacagggaagaaaaaattgcagtgaatgtatgactctagttcttaaggtatgccagcagtcacagcgacctctctcccctttctttccattgtttgcatgtttgtatgaaattattttgttcagggatgctgactgctcactctaactctccttgttctctcaaggatgaatattgtccctttgcttcagaaaccacaggattaaactttagggagattatatattaatcatttaatttgatcatcaggcatgagctctggccttcccactcaggacccctggccttgcagctagtggtgcagatggacagtagcagggtgacagagggccgccctccgccctgctccccaatttcttctgcctccagcatgagtgggtgagcagcagtggctcaggagcaccaggaggctcgcagcctcctgccgttctgcgaggacaggaggacagggtgcagtaggggtaaagcagtgtctaagtggaatttagcttgggcattgccagcatctgagagggaacataaggacttgggaaaccctttgacttgtttttgtcatctggagtgtccttactttgcctaaaaaatcgaaataagggccgggcgcagtggctcacatctgtaatcccagcactttgggaggccaaggcgggcggatcacaaggtcaggagatggagaccttcctggctaacacggtgaaaccccgtctctactaaaaatacaaaaaattagccgggcgtggtggcgggcgcctgtagtcccagctactctggaggctgaggcaggagaatagcgtgaacccgggaggcggagtttgcggtgagccgagatcgcgtcactgcactccagcctggagactggagtctttgagactttgtctgagactctgtctcaaaaaaaaaaaaaaaaaaaaaatcaaaataagatctggccatgagagagaagttacctttgatttgtagcagttctcaaaatcatcattctttgcagaaacaattattagttcagttttgtatatatgcagcatgagagcaacatctggaagacatctagccagaagctggaaatgtaggtctagtttaagaagccagggctggagtcattgctgtggctgtgacagagaagaacatggaagctacagaaaatgatgatgatgatgacaatgacagtcaacaggtgctgatgattactatgtgctacactctgtgcttagccctcaacaaactttatcacaagtaattctagcaacactacaaaagagacatctgttgctagccccattttacagatgtgcagtctgaggctcagagtggttgagtggctttcttcaggccacacagagctaactgaatgagaaggactcaaaaaaaaaaaaaaaaacaaaaaaaaaaacacagtaggccaggcgcagtggcccatgcctgtaatcccagcactttgtaaggccgaggtgggcagatcacctgaggtcaggagtttgagaccagcctggccaacatggcaaaactccgtctctactaaaagtacaaaaattagctgggcgtggtgggaagcacctgtaaccccagctactcaggaggctgaggcaggagtatcgcttgaacccaggaggtggaggttgcagtgagccaagatcacgccactgccctccagcctgggtgacaagagtgagactctgtctcaaaaacaagcaaacaaacaaaaacaaaaaaacaaaaacaaaacacagtaaacttctcagcgttctgaactttcaattgttttgtcataatgaaattacgtgaaaatgaatcccattctagaaaccacatttcctgtttgcaagttcaagaactaaaagtgggtggatgatgtttggtttctctgtagagaactggcaagcagcaacgtttgctttgaaaatcgtggaaaacgaagagcactaacagattcatacaccacccttgttcctctccttctagcttttaaaatttcctccgtttctttgtgtaagtgagtgggtaggagttggtagatatttctaagcagttaggaccctgaggtgataagggttgaggggaactgaaatgtagtttcttatcgagggctggataaaggaagaataaacacctcagtttacagctcagctcaggtgcaataatagacatgtagactgagaagctggcagccaccaattttattaaaagatttttctgtttgaattacatatcattttaccaagagaatattgaatcattgtgcatactgtgtacttctccagtgatgctaccaaggaggtattttatacctagatgatgtctcatagagaatcttttaagtataaaaagaatgtgttatccagagacctggctttttagttgtagtctggcattttagaaacactgtccagcagcatgatgtggcagagagaatggctaggaacacacggtttcaagctcttgcatttaattactatgtgacattgatcgagacactgaactcctcttagctttatttttttcccttcataatcttactagaccacatcatctccaaagtcttttgcagccataaaatctcagacagtatgaatttatatagtaattatccagagataaataatcatggaatcatagtttgaggtgacagaggatgaaattttaactgtcttcatagtagaataatccattttataaaattgtgaaatatatggtgctcacttcttcctttccttgattccatgagagggtcagcaaacctccactaaaaccctcagagcatggctggccttattctctaaaccagactttgatgcaatctgttgagcagagagaagcataacaaagccagaatgaagtctcattaagacaaacatggatgaaatgtcaggctgggaacagcaaagcttatttctatgtctcaacagatggctgggaaaacagtgtcttgttgatcttgttagaataaattatatacaaagaagctctctatataatgctagagtgtgtatgcagtacttgagtgtatttaacatacctatatatacatacgaatcagagtttctcaaccgcagcactattgacattttaggtcagatagttctttattttgaggggttgtcctgtaaactgtagaatgtctggcagcatccctggcctctacccactatctacagacataccttggggagagacatcatgagtttgatcatggattccagatcaccgcaataaagcaaatgtcagaatcaagcaagtcacacgaattttttagtttcccagtgcatgtaaaagttatgtttatattacactactacactatagtatattaagtatgcaacagccttatgtccagaaaataatgtacacaccataattcaaaaatagtgcattgctaaaaaatgctaacgattatctgagccttcagcatgctggaatctttttgctagtggagggttttgtctccatgttgatggctgctgactgactagggtggtagctacttacggctggggtggctatcgtaattccttaaaacaagacaacaataaaggttgcagcatcaattgactcttcctttcacagaacatttttctatagcaagcaatgctgtttgatagcattttacctacagtggaacttcttccagaattggagtcagtcttctcaaaccctgccaatgctttatcaactaagtttatgtaatatgctgaaatcttcgttgtcatttcaacagtgttcacagactcttcaccaggagcagatttcatctcaagaaatgactttctttgctcatccataagaagcaactcatctgttcaagttttaccaggttggagcaattcagtcacatcctcaagctctgcttctaattctaactctcttgccatttctgccacatctgtaattacttcctccactaaaggcttgaccccttaaaagttatccattggggttggaatcaaattcttccaaactcccgttaatgtttatattttgaccttttcccatgaatcacaaatgttcttaatggcatctagaattgtgatcctttccacaagggtttcaatttattttccccagatccatcagaggaatcactctctctgccagaaatagccttataaaatgtcactacttaaatataagacttgaaaatcaaaattccttgttgatccatgagctgcagaatgaatgttgtgttagcaggcatgaaaacaacattaatctttttgcacatctaccccagatacttcagagctcttggatggcaaggtacatagtttatgagtagtaatatttggaaagggatattttcttctgaggagtagactctcaaaagtagacttattagtaaaatattctgtgaaccatgctgtaaacacatatgttgtcacccagacttggttgtaccatttacagaggacaggcagagtatgtttagcataattgttaagggccataggatttttcaaatggtatatgagcattggcttcaacttaaagtcaccagctgcattagtgcctaacaagagagtcagcctgtcctttaaagctttgatggcgggcattgacttctcctctctagctatgaaaatcctagatggcctcttcttccaatataagattgacccctacatcaaaaaatctgttgtttagtgtagtagctttcatccattatttgaactagatcttctaaataacttgttgcagctttacatctttacatgaagcagtggttgtttcaccttgcactttcatgttatggtgacaccttctttccctaaacctcatgaactaccctctactagcttcagacttttcttctgcaacttcctaacctctctcagccttcatagaattgaagagttagtaccttgctctggattaggttttggcttaagggaatgtcgtggctggtttagtcttctatccaggccactgaaactttctccataatagccataaggctgttttgctttctcatcattcatgcattcactggagtaccactgttaaattccttcaacaactattcctttgtactcacaacttggctgtttggggcatgaggcccggctttcagcctgtcttggcttttgacatgtcttcctcactaagcttaatcatttctagcttttgatttaaagtgaaagacatgggccgagcacagtggctcatgcctataatctcagcactttggaaggccgaagcgggcagatcactggaggtcatgaattcgagaccagcctgaccaacatggtaaaacaccatctctactaaaaatacaaaaaattaagcattgtggtgtcacacacctgtaatcccagctactcgggagcctgaggcatgagaatcgcttgaacccaggagatggaggctgcagtgagctgggattgagccactacattccagcctgggtgaaaaagtgagactccatctcaaacaaacaaacaaacaaaaacaaacaaacaatgaaaaaaaaattaagtgagagacatgttcctcttccttttacttgaatacttacaagcagtgtaggttgaataattggcccaatttcattactgttgtgtctcaggaaatacatggcccaaggagagcaaaggagacagcagaaaggccagttggtggtgcactcagaacacatgcaacaggtaccatgtgcaccttatataggtgtgcttcatggtgccccaaaacaattaagtatgtcacatcaaagaacactgatcacagattaccataacagctgtaataataatgaaaatgtttaaaatcttgtgagattataaaaatgtgaaaaggagacacaaagtgagcacatgctattggaaaaatggtaccaacagacttgctctatgcagggttgccgcaaaccctcaacctgtgaaaaaaatgcaatattcacaaagcacagtaaaatgaggttatgcctgtactagtagcatccccttcacctagttttgataataaagatgtctctagacatggctaaatgtcctgtgtgagagatacacatacaaccacacacacacaaacacacacatacacatatgaattattgtacatattcatatatacacacatacatcaatgacatcagatctatactggcatggcactttcaacttcatgaataaattttctacatttttagaattagaagggtttgaggtatcaagtccaaccacataattttatagagtatgaaaactgttatgaaaactactgttattaacagactgtagcccagaaatgtaaataatgactcttacccagtgactgtaatttatcttttgttattagacacaagaacaccagattgagaccagcctggccaacatgtgaaacctcctctctactaaaaatacaaaaattagccaggcatggtggcaggcacctgtaatcccagctacttgggaggctgagtcaggagaatcgcgtgaacccaggaggtggaggtggaggctgcagcgagctgagatcatgtcactgcactccagaccgggtgacagagcaagactctgtctcaaaaaaaaaaagaaaaaaaaaaaaaaaaaagaacaccagaactggaagagatctcaacttcactcaacccagagtctattttacaaacaagaaagttacatctctactttttgcttttctgcccttctacccattacactgattgtttcgatcacttgttctgacagatttggtattaagtgaatcaattttattcctcaaagtggtagaatctgtgcccaattattgggagagacaaactttgcagagcatattccctttgttcaggtaagtggtgacaggttgagtcagctccaggctcagaactcacatctgctgagttccacttaggttttgtggtagcaagaacacaattatctagtcaattgctctggagggaacatcatcttgaaaacatgaccaaattcacaccactgtaattaatcagacaactgctctagtgtgatcgtggttaccactccatagaattggaattgtctttttaaacccgaggagacactgctcactttaaggttgaactttatagaagctggtcccacatttggatgctaattagcaaaataatacccacaatgcaacctgattaaacgtttcacccatgggtggaaacgcattaagtaaacaatgctgtaaataaaataagattgtgtcaacagaatatatttgtgtcagtatgaaaaaatacttaaaatcccttaaaaatagctcttcatattttaatgtcctagaattgttaacttttaaagatgaagattttgggggattatcaagataggactatagaaagaatttatttaaaagagcaaaaggcagtgttgcactgtgcattaattgcatgtaaagatacaccaggaacttagaagggtctggttccaatttgcaaatgctagtacagtacatgttttcatccctaatcatattacatcatctttgtgtgtttgagggcacagataagacttattcaaacttctagttgacatgcattttgcttttgaaaaccaaaggttctcattttctattagcttttgtgctactagtttcacagcatttgaagattcctgaatttctgtgcatattggtttttccacttatcaatattcatatacagaagcaattattactgtgaatcaccatgataataaacccgattttacagcaccaaagtaaagagaaatctgtatttaatctccatttgtctgtactggaatgaagtattcttaaatctgagaaagtcaattattattcaaagaacaatcacagcatagttaaaaaatgagaaatccaggacagcagaaggtgtaaagaaggcatttatcagacaccaagggaaaagggaaagacggttgatagctgaggtgtccagttaaaactcaactagcaacacaaatctctggtaggtatcactgataaaggtcaaggggaacagagttatgacagtgaactttaaaaatactgacaggaaacaagagtactggtttccacgtgtgttgccttgctattcacataaaaccattagtcctttcacagaagggtttattgatttacacagatactcgtttgtcacatcctgtagagtacattaaaagctgcccaggtatttcaaatgtacttagcaaatttgccttctcacttgtgtgcagtctggaatcttggctgtaagatagttttcagcataaaaggcttgattgaagagaaagtcagcaacttaacaaaagaatcgccgtgaggcctctttgtgatgtcttaccaagaagctgctctcatggctggtggacattgatggggaattcatcatgtgaaggggacttaacacattagatgcacagggattcacaaaggatgaacaacacagttttcctcttgctcatccccataatattactgacttcctatgtagtttgtcacttccgccagatgtgactgccacatgcccagtcctgtgtcatgtaggaggcagtgcagagtaactgataggagaggtggctttggcatccacttatgtaggtgtgaattctgattccacagcttatcgacaccctcaccctgggtcacttgcctctttaccattcagtttcccaatctataaaatgagagtaaaaacagtacctggatcacaggttgttgtgagggtcacatgggataatgcatggagagcactgaagaagatgcctagtctaaagtgatgccaccttgtagagctgcagctcccaccccccttgccacatgggctactcataaattaactaacattaatttaaaccaaaaatgcagttcctcagtcccaccagacacatttcaaatgatcaatagccttgtttggctaaatggctaccattttggttaaatggctaccatgctggacagcacagatagagaacatttccaacactgcagaaagttctattggatagtactattttagagggtgacttacatagttttaactttattaactagtttttaataagcattatcatttaatctgaggcacaggcccgtgtctgatagtcactgaaaattatttaatgtgttgatgtgacaaatgtatgttgacagacctcaactcatatttgtatcacttcctttccttctaaatcatgctttcatgtttatctcaatttatcctcacaatatccttgtcaggtaaatacatcagacatctattattttcatgtcacaggggaaacagaatgtgtggtatatgtacattcagataagcaaataatgtctatcttttggagggttttgagagtaagaaacagattaggcaaggtagactacttgggaggaagttcttattttttctggttcaaaactagtaagagtttattaggagaaacttgaaaaatacacaaactatgatgaaagcaaatattgttcaaacttatgcaacccacacgtaattaccattaatgttataatgtagcttttcaggggtataaaatatacattgtatattacaatttatgtattgggtgataattctttttcttgtgacatagagtaaatatttccccacaccattaaaaatatttgataatggcccggcgcggtggctcacgcctgtaatcccagcactttgggaggctgaggcaggcggatcctgaggtcaggagatcgagaccatcttggctaatgcagtgaaaccccatctctactaaaaatacaaaaaattagccaggcatggtggcgagtgcttgtagtcccagctacttgggaggctgaggcaagagaatggcatgaacatgggaggcggagcttgcagtgagctgagatggcgccactgcactccagcctgggcaacagagtgagactgtctcaaaaataaataaataaaaattaaataaataataaataaaaataattaaataaaaataaataaataaataaaaattaaataaaaattaaaaaatatattcgataacataatgcatgcacaagattgtattatgggaccatactatacgttatttaaccatttctcatgtttgctgcaaggattatgcttaaacataaatctcattttacatcatggagtattttgaaagatagagccctgcagttacaactactggatgaaagccctagaactttctcagggacttctagtacataggattactttgctttctggaaaggctatatcaaatttcacttccccaggagcatacgtgagaatcaccgcccactgattagtaccatctaaacattttgccaattttgtacacaaaatatcctcttttcttatttcactttttattgccttggtctcatgtgaggctaaaattttcccttgtgttaattagctaatggtattttctaatctgtggattgtctcttcataccctttgccaagcttcctgtcacaatgttcctgttatgagtttatactaaatcttcataatgaggatagaaaaaatctagttctgatgttttctgtttgtcctttaatgttgtttctgatatttctgatatttttatgttcatagcatttaaatgtttataaagtcaaatcaatcttctttttcctttgtgatttccttcattgattttgtaatcaaaaagtccttttcccacccgagcaaacttaaatagccacttttgttttcctcaagcttaataatgtttcaattatcttttttttggtacatttatctctttaatccacataggatttatgttatgctgtcacataagtatcttctttctttccaaatagtgatattattgtcccagaacatttccagaatcagttttgcttctgtgttgatatacaatatctcctttacaactattaaactgttaaattttgcaagacttatggcagcatggcttattctgttttatggatccaccttatctaaaactgtaatcacacagttttaattactgtaagttcacatcgtttcaatatatgatatggcgagccagcatttgtgagtcctctcttttcgaaacatttcttggcttgtttattgttctacatgaactatagaaccatttcaaattcttcccatagctctcctctaattctactgattttttctacttgtcaagatttaatccaaccttaaattttgggaaaaagtatcagctttgtaatatttggcctgcctatcttggaacatggtatgtctctttactaaattctgccttatttcttacaacgagtgttatagttttctttaaattggttttgcacattttaaaaatagtattttataaccttcattatatttatacactgaattttcccgataatttttgagccaccattcctcatttacagaaaactactgatttttatatactcatacctgaccaccttactgcactctttatccgttctaatgctcttccaattgattttctcaggttcatagtatatactatgccacttgcaaatatttttttccttcttctcaatagccagttttatttctgattcacatatgaagggacgcagcagaactccaaaaacaatgtgaactaagtgtgcagatcattgatgtgattgttcctgactgcagtaaatagctccagcatatttttctattgagattgctattggttaccaaataaagctattctttatcctgttaaaaattatacatttagttcaaattttccaagagtttgaaacaaaaactggtttggaattgactgaaagactattgatctattatttttctaagatggtgtttggatttctttgccagatttgggtatctttccatccaactatagttactggagtagctaacagagcaagagagttctctaagacttgaaattttacaaaaatttgtccacagactacttgactagagggaatgaattccaatttaactagatgtgggacaaattagctgttaatgaaagtgccaacaaaattacagaagcagatggctattttctagatgagagattatactgtaaagagagaggcatttttggagttgtcatcgccatgcagaggtgatatggaccttgcaccccaaccaaaattttgttttggatattgagactgataataccacatgcacatgaagaaggcatgaaaatacttataactcccataatgaggtcttctggggagattaggggagacccccaagcagatctgaagtagcttgagagagcccaaccttgcttagtttgaacttcccacctgagccaaagaagaaagtacctgggctttcttgacaaccagagcagatgtggagcagaatggaaagggatagtggtgaggcttcaaagctgccagcaaacataaaacatggagtcaaactctttattacagttgaggttgaagaaagatcagaggagcactgatttgatgatggagaaagaagacatgaaaattgatggtcatggacctcaggagtttgggggtcaaaacagcaattctccaaatatttaaaattgcatgatgaataaaggattcaggctacaatagaattttctttcttgacacgttttacttgaatgatttactgttttgcagaaaatttactgaacttacactgcatccaaggattgtgacttttgtaccataatcaaaatcattgttgttgaaattccaaaagaatattttaaatatgcaagagcagaaacatagggaatttagccttttcctaacattatttatattactaaacattacttttaacttatgaatagtgacaaaatatttagaacaacataaggaaatacaaatacctagaaactgaaaaccttttagtccatcctcaactcataacaatgatcacctaaccaaggttagccatttttgaggttgaatatagacttttccaaccctgtttgattctttacctaaaaggtaaaataccttgaggacacacctggctctaacttgggcatttcagagattaagatcacgcgggtagcaaagtcttcagggctgctgcttctcaaaaatttagagtcctctttaagtttagcccagagggctataaactcccatcttaagatactcagtttagctcttagagactctgtccacattttcctctttgtaggtgggaaaagatacttcctatgtcacctgcctgaagccatcacctgtatgtgcactaagaggcagtatgattgcctcataatcaaggctcttaccactcaaagacacgttttagaggtgtttagataaacatctcagttaatgtaatcattcttttttctttttttttgagaaggagtctcgctgtgttgcccaggctggagttcagtggcacgatcttggctcactgcaagctcagtctcccgggttcacgccattctcctgcctcagcctcccgagtagctgggactacaggcgcccaccaccatgcccggctaattttttgtagttttagtagagagggggtttcaccatgttagccaggatggtctcgatctcctgacctcgtgatcctcctgcctcatcctcccaaagtgctgggattacaggcgtgagccaccatgcctggcccacaatgtaatcattctttataaagcctcatacccaacagagatttatttggtcaatgcttttgtttataaaagcttattagtcacaataagcaactcctcctatacctagacacttttaacagttacaaattctttctttagattagattttcatttctgtaacctttatttattaactcctttttgcttttaagagctatattaaatatatctctatggggttacacaaaacattttttttttatatttacacatctaaattacatcatcttgatttttctttccctaaattaagtagctgtggcctgatttctatcttttcctacaacatggtttttaggtgcttcaccatcttggttgtcttttctctttctcttcttttctttctttcctaaggcactctggtcagtcaatttctctcttgaaatgcaagtatccagaatcaaatcctttaggatgtggtctgaatggggtagagtgtggcaggactaactgtggtcttccaaaaggatattattcttctatcgaatatcctccgactgtcttagcttttagcataatcttgactaatactaagcttatcttcaactactctcccatgatttttcttttaatgctaattgtttttaagcctcttgatttaataaattgatttttaagccaaaaatgcaggaggtgacatttattactgttaaatttttatcttgtttactatagtccactgttgcaggatattaagaaatgaaagaatatctggaattctgactgtgacaaaatcagttatgctaccttcccagtttggattacctttatgttaaaaacctgctgtataatcttcatgttattgacaaattatgctgaataatgcagttctaaaacatggatccctatggcataattctgaaatatcgtagtctttattgtggcagctgattacaattacgaatctttccaactgaaagatcagccaacacacatttcttcatcctcactgaacagtgtcataagttaagtaatcagatgttttgttgaaatcttggtgtgatcaacttatggcaatctcacggtaagcagtttttaaaaaatcgattaaaaaagaaaatactggccaggtgcggtggctcatgcctgtaatcccagcacattgggaggccaaagcaggaggaccacttgaggtcaggagttcaagaccagcatggtcaacatggtgaaacctcatctctacaaaaatgcacaaattagctacgtgtggtggcgcacgcctgtgatcccagctactcaggaggctgaggcaggagaattgcttgaacctgggaggtggaggttgctgtgaactgagatggcaccactgtactccagcctgggtgacagagcaatactccatctcaaaaaaaaaattatatctatctatcttatttttagtatgctcaggctatatccaatgatcatgcctttctttctcatttgctcctttttagaaatttcccaggcagcaatctcaaatttcttatgctagggtattcaaattttcccctttatcaaaatgaagacggtattatcttctatattccatttcctcagagattatcgacaatggttctgagataatatccagtacttggaatgtaattttcctgactgggagatgactcatccagaggagctaactgcttgtgttctaactcctcaccaatcttgggcattgattcatccattgggataattactccatccttcccaatgtgaggaacactttgctttacagaaactacagatggaaaacaggaggtgactagctttgtcatttatggctcctgctgctgcaaatgctgctgttttcaccatgtaaccaaaatctccaagtggttgagaaatcatatgatttttcttcttggagggatatgagtagcaagctcttaaaaagtccttactctatgtgataggacttgctaaatgcttaaagaatcttatttaatattcacagtaaacctatgatggaagtgcagtcattatgcccattttacaggcaacaatgcttacaattagagcagttaaggaacttgcctgaggcacggctagtgaaaacgtggagtcagtattcagactcagggttttctgataccagcaaccataatattttaaattttttttcatttctaatttttatgggtatatagtaggtgtatgtatttatggggtacatgagatgctttgatacaggcatgcaatgtgtaataatcacatcatggagaatggggtacccataccctcaagcatttatcctttgtgttacaaagaatccaattatactcttttagttatctaatatttaaaaatgtacaattattattgactatagtcaataatatttgtgctatcatatagtagctcttacacattcttcctatttttctgtacccacccattaaccatccccatctcccccgagcacgcccccaactacctttcccagcttctagtaaccatccttctactctctatattcatgagttcaattattttaatttttagatcccacaaataagtgaaaacatggaatgtttgtctttctgtgcctggcttatttcacttaacataatcacctccagttccatgcatgcctttgcaaatgactggatcacattctttttcatggctgaatagtactccattgtatatatgtaccacattttctttatccattcatgtgttgatgaacacttagtttgctcccaaatcttagctattgactactatgctacattgcaattcatttttttctttaaatacaaaagaatattttaattactgttttagaaactataaagcttatatgtataagctttggattggattggatttggaaatgagactgtaccaaacaatggccaaagaagactcatccattctaggccttctcttttgcctggtaactcagaagtataattctatctcataagcatcagtactcataggcccagttagttacttacaacatggccgttttctgcaaatggatgccacatctcttgggcctggctggaatactgatattccgtgccatgttgtcttctgaccgacaccacccattcggtagagagacttcactgcctgattcccacatctcatttgttgctagagaatactgtgactggatgtttttccttccacctgtctcatgataggggcctgacccactcagccaagtaactgcacatgattcatggatctttcaagaaacaaattgctggtcatttcagactcacgtcttacaaactgataaagcacttgtaacgcaggtcttcaaacatggcttctattttcttttcttaaaatctaatctttagactcttcctgatgctctagctcagccagtgtccagctaggaaatcaattccagtgcactacaattcacttaaaaaatgtaaatttggttgacattctgactttttggcaaattttagttcatcattgacttttatattttatgatactattcttttaagtttatgcctctcttgtatcaggtaatagtctttccttcctgcaaaattccaagtcctttaaaaatcaaattttgttggtgaactccctatgtgatattttagttaaatatctcactgtgacctcccctttttcctactacagttcaaaagtcttcttttgtgtttgtatgtgtgtatatacatgtaaatgctggcactgttttctaagcatttcccacacagaaggacatattttcctttgccctcctatgtgaactccataagcagagaaagggccctggttcccatcctaaagaggtaacggagaattctctctgcagcacaaaaaggaaaaagatttattattccctggatcctattacatacatctgctgaactcccccatggctccggtaaactgcaggactgttgattagcgggccctcccaggccttccaagctgcctgagagctggccagtcgctgcttcttgctggtggttggaggcacgcccacagtgtctgcctggaggagcctgtgagctggggatatctgcagaaactaccaatctgagccattaaagaaaactggtgaaagagtggtgttagaaaagagtactcatagttttctactcagcagaggactagctctcaaactcttctgtgcaaagtcagatgctggcctgtggtgactatgtggcagtgagagaaagaggcaggcttgggcacctccaacaggaccatacagggactgctgtgcctgaagtgagccaagctctcgctctctgtggcacagtgccctttgggaaaagtcatcatatggtccagaggaagaaatgcatcctatcctagacttggtacataataccattttattcaagtacatgagtatgaaaatgcattcaaataacccataataaaactttggacagtcaatcagggtttttcagaatatatagatagatttcatctgcagagccttcaaccctctgtggactatgtttcttttcagagcccgtccatgacatcatagttgctcattcaatgaacattctgatatcttatttcctaaacattaagtagtgtgtacatatctacaaactgccctgcttcctatggttcctttgatgctgatttgcttctttaagccttccttccttccaaaccatgaatcaggtccttccagaggctaagaattaagttcacaattaaggcgactccctcactgtttcctctgctttcagagaggggaaaatacttccaggacaagtcaagaatttatcagatgctctgctttcagcagcctgaaactttcagcaggaacacgatagccgaaatcccatgccacttcttctattgaggcttccgtttaaatcaggtgagattaatcatcctccccctgtatagtctggttctagtgttatttcacatccctcctcatctgtgctttgaaatgatatagaatttttttctatatcaacaacttcacaaatttccagtttgctttcaatttgaatgttatccctacagaacattagaaagcactcagtgtttaataacctaataatttaatatgctgccctcaaactactacggtctcttccctatacttaagacttggacctaagatttgtctcaataaattattcagctaccatcaccagggcctttcagctatgatatgccctggtgatcgtagctgaatcatttattgagacagctcttatttattgattatccaccatgtgccaagttcctacataacacagtcagtccacacagaaatgttatatgttaatcatgcacatctagcttgcaaataagataaagagactttaataaataacataaacacagatctgactatctttacaccatgtcatggataagagagattctacagccagatggaacctgggtcactatactatttattagctgtgtgatctcgggtgtgatgcttaacctctcagtgacttggtgccctcatatgtagactagagacaagaagaacaataatgtggttttatgaaggataaataagaggtgaaaactgatagaatatgcctgctacctagttagctctcaataaatgttagctgtcttctgaatttttatttgtacttataaatcaattttttccataaggctggttcttagcattatagatgtaaatgatcactttgggaggtggacgctgataaagagtattgactgggttctgtggctttgcttcccaccaaaatgcctcttgcaaattatgcaagacagtaccttgcataataaacatttgaatatttgaataaacaagacttcaatttttaagatatctatgtttggaaatacccacaaagaacagggctcatattgaagtgcatggagaaaactcttgtcataattttccattctctctatcctctattagcatacttatcgtcttcttcaatctataagtaaatttgaaaaataatggaattcagatttatttatgaaaatgaatctgctttttcgtttagcccaatgggctcagttggtaatatttcccaaggggtccttttaagattcttaaagtaaacatatagttaaaactcgcaccaccttgaaaaataagcataagagccttaattgcctttttcttggcatacatcaatttctacacataaaaatgcagtactgaataacagcagtaagccaaatttctttcaaatagcacatctatgtgaatagtagctgtccattatgtttcttaaaatctaggaggctaaatcatatttgtgaaaagaaactttataataaaatttaaaaagcctaattcgtgtgcaaagaaaaaaggcatagaaatgtttctttttaaattaatacaaaaccttcccacatgctccaaaacagtaacaatttgatgttaaaataattcattgtatagtcttttatgataaaaattttagaaaaaaaataatgaagtgtaaaatataagcaagataggagaggaaatttggggaaattttaactgatctattttttaagtagaaatggacaattcctgagatagccctgttttctctttggccccctttcacaaatagtctcatggactaatactacctttaaaatacaactgcaatatagactctctgaaacccaaatgctgggggtagggccaggagagaactgagaacacaatggaatcttgaatgggatcttgtaccccagtaacgttaaaggacttctgaattctatgaccactgaaggtactcagcactttaagacctgtgcatttcaccacccgataattttatttcaatacaaatgagatagttttgtaaatctgatgggtcactgagacgtgaatgctgctcaaggccatcagataaaaagcctatcaggaggaagtgtgatagccctggatatgtgtgttttgtggcttcatccttagagcaacactgctgtatgatgacatcccagaaagatcatagctcttatcctaagtgtctcaagaggcaatctaagatattgccagaactcagccagccatcaagtaaagctatggccaaaaaaaaaaaaaaaatgcctattgcataccttctatttcagcaattaggcctctaagtattcatctaaggaaataatctaaatgtttatttaaaatgtgcacaaatagaagggtgctcgctgttgcaccagacatgtgatgaacctaagaccggatggaccatttgatggatctgctagacttgtggctaagggcatccagtgtctccttcctgagtttatatcatggggaaggaagtctgaatggtgaacagtggcatactgtgcagagctgtatcagatgagaagacgagaggccgtcctgtgtgctgcatggcctgacctggtgtgattcctacagagaaaggagcaggaggctaaaggggatgaggctgtttccaaacatgatttgggaactgctgctctagtcaccaaaatcccactttggggcccaggagggaaaggcatgttcccatcattttcttggacaggaagcaaggtgattgcaaaccaacaggggctacatcctgggaacaaggcactgcagaactctcaggataagtagttctggaacactgtaaacacagaatacagcccactggttggggcatcagaattcctgtgggggtgccccgagtagcagtcacagagaggggccttcgctaagctgctttcaatccaggtttgtgtgtgaggatgtgtcagtcacaaatggaagaagatgtttttatgactgtacatacgaatgtcctgggaacttctgaaataactagggggaagtttcttgtggggaagagtgagcagagcctctgtgtctgttgggagtggggaaagatggaaaagagccagccacactcagtttcttaatgtgacctaatctgaccccagaggcagatggcttagggagacttggggataatatttataatacggtaaatttggaaacagataaaatacccaacactagagcattggttaagtgaattatcacacatccatacaatgtgaggtggggctatgactcaataaatgtgtatactttctctgtatttcacagcctcactacattcattctcactgttaccccaagggaactgctagacctcagtgagcagaggcaatgctcagagaaattgactgccaaagtaaagacagaaatattcatgtttgcagaggctgccctctttttttttaacagcaagcaaagatgagaaatactatggtgaaggcaaattgggataggcaggggacccactatattgtgccttgggttaagaacttccctaggcatagactgaccacagaatttatgatcgaatgtgacagagggcgttagctggatgagtaactgggactcagagaaccttactttgcatggggctggttgatcctaggccactgttacaaacggatcattatgtaaccattaaagtgacagcataaaaacacacatcataaagtggaaaggttccactgtgacattactaacaatcacgttacaaaaaggcttgtactgtaggatcccattaaaataggaagaggcatagagaagaatgactggcgtgtagatgccaaaaagaatgattatttctgtattaactgtataaaaggttatttgaattctgtggttttccatctttctattaatggacatttattgcttgtaaaattaaagtttatattaaaatgtgaaagaaagttagttgacttaggaccaaaagtacagcttatatgtggcactagctgcttaattttgaaattcaatttctagaccacctttggaatcatcactacaattttactgtggactcaaatgatgattttctcaagggcatgatctgtatcttatttcatctctttacttttttggaggggttagaataacccagtttgtagctgtgatgtaggttagcatgtggctgccttcctgggtaaatcaaattgaaatattctactttgagtcttgattctctaatgcaaaattgatggaagtgccagagtggagtagacccaataatgatgacaactaatgtttatggaatggtttccatgtacctgtgtgccaggcactgttgtaggctctttgtgtgctttatttaattctcacaataatcatatgacataggaactcttaacatcccttgtttacagataagaaagctaagcagaaagatatgcagtgacttgtccaaggtaactgaaaatatgtaatctactcttgatctgccatggctttgatgaaactagcaagccactcttgagtttggcagaaaaatgacttaaaataattttcagtgcttcattatggttttagaaaatgatttttaaaaaactttaatatatacttttgataactcatttataagatccatacgtttggctgctcatcataatttacactgtgttctgatgttatacagaagagggcattaaaatgatagttcatagcccttatttaaccgccaggattggtaattttcattttgtcctttaatctattgggttggttgactcatttgttataaaaacttgataacattttagtaaatacatttttctgctttaaaatttataatagttgattattatgattagtatttacagttgctaacttgaagaacaaacataaactaggcaaatacagggaaaatattatttcacattctttgactttattggctgcagagatgggaaaacagccctacaggtgcacctttgtccacctgtggggcttaaacatccagctcccatgagctctttattgaggccatcagaaacacaggcctgtgactatgattccttttaatgtgtctttgggctccaaaccataagacttctctccaatcactctgtcacttaactctaaatcccacttataccatttcataaatttagtttctctgaggatcctcctcctcctctgcaggaggaccaatttaaatcatccttaaatcatcacattaaacactagctatcattggctgcaagggaaccaagaagtatattataccaagtcttaaaatgctgtccatgcctttttaattttaccataaaatcagagatagctatttgatcaggaaggatttaatgagtttaccttttaaactaatggactataatgggctccttaaattttgcatgtaaaaacccatgggttgggaaactttcaatttctccttaataactcatcactataaatcagattcctttaatatactatgcatcaacattgcaatgagctcagaaggatctggtaccattttcttcctgatgtctcagccacaaggaaaggctggtttttttctgaaaggtagtactcaaagcaatttcattttatttccctctacagaagatatcagatatttaattaagcactcccataaaagatctacccttaggtatttcagaatgacctgttccttgaggatttccttggtttctctcttgctagaaaagaaattaaaagacatagatcgtagggtttgtcatggtacattcagcatatattttgtaatttttttttatagccagtagttaaatattaacagtagaatgcatttattggatcatttctcctccaactaaaatataacactaatgattataatgatgatgacattacaacatccataatgatgatgacaatgctattataaaataacgttaacttgatccttctccaaagctttgcatttctctagatttctaaaataagaacaaaaaagacaataaaacacaagtgattcaaaggacagtataatgtaaataacaatgctttctgaagattccaagtttagaaaaagccatgaaaagaaattccaagtttagaaatagccatgaaaagaaattgcttcctgaattacatagtaaatcacaatctgatgcctaaaggcttttgacagtgaaaggtctacacattgccaaatattgggatgaaagcttcatgttttcaaatacccagtatcaaacaaaacaaggatattcccaattcatctggagttggcaccatggtaagtcacaaatgatctggtttaacttcttaaacaaatgatgaatttattgtttcatttcatggacctacaagccatagtcaaagggagaaacagaaattgtccagcttcttttccatcaacctaactaacatggcaattcacatagcaaagtggatttgcagtgacaagagaggaagccaatttacatgtatgggtggaatgggagtggtgatacagccttcttggtctgggggatggagaagggaaagaaaaatgcactttcaggtagagcactcccaggatgtgttcacttcagctaaaaattcatcaattaccctgccacagagaataccaagattatagtacagcatataattaaagaaggtggaggcgcagaggccctggcagagactgtgtctgtctatcttgctttgaatgtgtgttctacacagcagcacatgtagcttgctggagtctgggcacctggagagaagggtgggtgggagccaccgctgacagagagtcattcactgaacacgcaaactagctaaaagaaattaatgttaacaccaatcacaagattaaatacacaacatttgatgcaagatcaacagcgggatgatggtatagcttctgaaaacaggtggagttgaccttaaagaaatcagatcagcaacgacagacaagaagaacagaagagacaaagggcagaagaaacagaaggaaagaaaaagataaagcaaaaaaagaaaaaaatgagaaggaataaagaaaatatgatctctagaagatgacatctatacttctacaagacgatgcatcaactctagggaaatttagggcttatatgaaatatagaaatttgactcaaagtgactggaagatgctgagtctatttttcacacagctccagaatgagcagtaagtatctgcaaagttatgaagagaggccaagtcttgcttgtgtctaccttagttatcaaagggcagaaaagggacctctgtggcctggatgctgttgctggttgaaatgtgcattgctggagccaattttaaaatccaagtagcaagttcatggttccttggctactgcctgcatacctacattgcccagctgactggaccaccaggacccaccgtattcccctctcccccttgccatctggccttttcatgattttttttcttttaaattaagttcctatgctatttcatggcaggaagttttgtgtgatgtatctatgccagctctgaagtcagactgttcacaactcagtttcaccatttcaatcagatagttatgtgaccaagggcaggttactggtcctctctgaggtcctaggtaggaataacaacacattccacagaggaggagctgtttgctcattttgctttcacatactagaaatgttcacaattattctccatcctacaccatgtgttgagtactatctgtgggttacagcatcatgtaaaaagttaggcagagaaaaaaggacccccttttgttgatggactctaccaaaaaaaaagtgggagacaaagggaaagctgatggccaagaattaagaaagttcctgtaagaaaattcaacacttgcctgggggtgctgtgtgttgactttccatagcatgaggcctggttcaagggacctgaatgtcatgttccattgagagcttatatatatatggaagaacttatatatatatatatatataagttagtttatatatatatatacgtatatgtatatatatgtatatatatatatgtatatatatgtgtatatatatatgtatatatatgtatgtatatatatatatatatatatatatatatatatatatatatatatatggaagaactaggttgtcctttgagggctgggtccttctgctcctcattagctcagaatgcacctccctattctccttatttaaaactgtattaaactgacaattctacttgattgagatcctgatctcccttgtggcatttaggccttaatgtatggcactacagttaagtatcatcaactcccagcccactagtgtgaaatccaagaatcaaagtccatcatcagcaggaaagacattgactgaactgtatatattcccagagaggatcttctcatccttaaacccttccttggtttttctcatcctctcacgaagctttatctgccattcctaggttgatgaatcctcaaagtaagccccacaggaacctcatgtaccaaactgaaccctttatctctctctccaatctcctctgttgtggaggatccagaaactagggtataatcctccttctctaagacatggagacctccttctcacccaacactcccacctgaagcaggccctcaatcctgtagattctccctttttaacattcctcaaacatgtgtcccactgcaactaattataacttttttctttattgtaagctggcttctcagattctaggatagctcaatataacatccccataacaaatatttatcgagttgtccactaggtaccagaaatatgcaggtggataagtaaagagccattgcaatgctgctaggacatgagtatatgatgctattgggcatgcacaggagggatatctaacctagtctttgatagctcagagaaggcctcctggaggtagtggcaatcatcccgcctttgaaggctgagtgcaggtgtgttagccaggtatagcatcagttgatgtttcctgggccaacatcaattacctatctttgggaaagagtatcttgacttacgaggaacctcttcccctaccctacaagtcactgttcctgtgatttggttggagctgactccaatacagcacctccactcctcctgctttccaggtgggaatgtaatgcaggtttggccattcggtgcattccaaccccatggcctcagtgactgtttcagagatgagcccatgactctatcagagtcaatatcaggacttttgctgggaggtgcttagtttccacggacatgactgcgagcccaagatgtaggtctagaaatgttggccattattttgctaccctgtactgagagtctgcctgagaacagagcagagagatggacagaaaaagacacctgattctgatgacaccacctgggttcatgaacgcagctatgcagggagctacttctgagtaaatacactgccagaaccagtgtgagttaggttttctgccatttgtaactaacaaagttcttactaatgcattaaggaggaaaagagtattctaggaggagggaatcatacatgtaaaagctcagagaccaagaaactttgacccattctatgtacaaagttctatgtgaccagagagtaggagagaagagtcacttggagaagaagctagaaaagttaagagccaggcttttccagtagaatgttgctctgccagagtcaatgtcataaaatgcaaatgtgatcatgcaattcctctcccctgcttaaaatactttaatgagaccccaaaggttttaggatgaagttcaaacccattagcttggcacccaaggcttttgatgacctggctgttccttctctctctggactcatctcccacatctctcccatgggcaacctgtgctccagctaaattaaactacttgtagttttccaaacagggcatgctgtttcatgcctttgtgccttcatattgcaatgcattatataatttaatcctcacaagggcccccatgaagtgcatattattatcctgatgttcccagaagtatagagaagttgaggagcctcaaaaatcatacagccagcaagacagagatctaggatttgaacacatatgtctgacaccaaagctctccttctttcttttctactaccactcattccagttcttttaacttctggtcatggacctttatgttgcacagcctggtcttttaatggaatcaataaaatttcagaatttcaggagtgggggctggagggatgcataatgttcaatttaaagctactttgctactaaaatcaacacaactgcatcttctttcagtccaccttttttttagcatctccttcatgccaggcactgtgtggagagatggtgctacagaggtaaactaatccagctacagtccttgccttcatgggctttcagcaaagtaatctactcctcacacttaattctcctgagaaggcttcctggatacacttgagaatgaactccactttggttatacagacacatggaactccatcactgctgttgctgagaaaatatcaatggctacattattttcaactgctgcctatgagttatatcagagattaattgatcagctaaatgagaaaatgcagagaatacacaaggaataaatcgatgaaggaaaaagtgtgctgtgtcttctatacctgggatcaattgtgttacagctcactcagagaggcaccagattgccaaacagcctgcttgcaaggggtcacaaatagggcaaatcaccagcttaacaacatgtgaaattttcattgtcttatttataaccaatttctcactaaagtgaacaacatttcttaatggtacagttctgcagaagaacaaactagaaatgttttctttccttctaattgggacaaaactgatcatcacctaatgggctctttacagagaataaaagaaactaaactaaaaaaaatgctcagcacgaattggacgctaaggattaaatgaaaataaaaggacagttttgtttcatttttacctcagatctttaaaggtactgttagaaaaatctaataattgttttataactcttatttggtagaaaaagctaattattattaaaaattttaataaaaatgagaaaggattgtcgagaagtgaaaaattaaaagggagatttccaatgttgaaaaagcaccttttatgaacataaaaatctatcagtctgtcctcccctaaccatatttggataggatctgacacattaaaagctggacgttagcccagttagcctgagtgagaagtgattcaggagacaccagacataaaccaaatggctggccccacaaccagtgggtaaaagatgcttgctgtccagcagggtctgcagagccaagtggtcacagtgcccagagaagcccccttgggcaggcgacccctacaaacctcagcttctactcctgggcagaggcttttacagtcctgaaaatgctatgctacagaagagacattctgcgagtgaaaaaagccattattccacccaggaaaaagatgatttttttttcccataaccgcagtggccatcaaaaaatggattcatttttcttgtgctgtactctgggcccataaaatagtttcaggatctcaaaaagacgatgtcgtagatggaagttttgttgcaatgagccagccagaagtgagaatgactttaaaagactgaatttttaaaatgctctaaacccaaagattaagaaaatataaaatattacagataggtcactccttttgtgttgtgtgagttaatcatgtttattcaatgggtcccactttaaatgcagtatgtcaaatcctaaaatattattcttagttcttttaaaattacatgacatattctcttatcaacataggccaataaaatacaaacaggcataattggtgcaagacaacccttaacagctagtccaggttaatccactggcatggattagattatgaaaggtttaaataactaatttcaaagtcttacatatacatcagggatttcatttgactaagcttagtgattatttgagtgttaaccagagtaagttgagaggctataaaacccatgccaaatcacattcaataacatgagacctagggaggtctaactggaactgcagaattgacgtgaaaaaaatactaaggaatattttcattatagatttatgaatgtgaagtggattgggatagattttttttttaagctaagggtgaaaaaatagagatttagtgaaaataagttagggcaaaatggcaccttgtgatttagaattgtatgttttgcatctcatacccctacagaggctggctgtgccttagacacagtagtgatttgcttcttttgggggcagtggtcttcaacatttttggcaccaaggaccagtttcgtggaagataatttttccatggactttgttggggggtggggaatggtttcaggatgaaactgttccacctcagatcatcaggcattagattcttataaggagtgcacaacctagatccctcacatgtgaaggtcacaataaagtttgcactcctataagaatctaatgctggccaggcacggtggctcacgcctgtaatcccagcattttgggaggccgaggcgggcagatcagaaggtcagcagatcaagaccatcctggttaacacggtgaaacatcatctctactaaaagtacaaaaaaaaaaaaaattagccgggcatggtggcaggcacctgtagtcccagctactctggaggctgaggcaggagaatggcgtgaacctgggaggcggagtttgcagtaatccaagattgtgccactgcactccagcctgggtgatagagcgagactccgtctcaaaaaaaaaaaaaaaaaaaaaaaatctaatgctgccacttatctgacaggaggcagaggagctcaggcagtaatgctctctcacccactggcccactgctcacctcctgctgtgcagcctggtttctaacagcccacagagagataacaggtctgtggcctgggggttggggacccctgttttgggggatagttaattctagtctaaaattcatcttcaatagttgaggaagtaactttgccaatgtgacaaagtaaggtaggggatacaaagttctaaaatcaagatttcctgaccaccaggtgttatgttttttactaatcttttctaaaaaattttacgaatttagggggtacaagtgcagttgtgttacatggataaattgtgtagtggaagtctgaactttcagtgtagccatcacctgaagagtgtacattgtatccattatgtaatttctcatccttcacccctctctcactctcccaccattttgggtcttcaatgattattatcacacactttaggtccatgtgtacacattatttagttcccacttacaagtgagaaattgtggtattcgacgttctgtttctgtttctgagttatttctcttaggataatggcctccagttccatccatgtttctgcaaaagatatgatttcattccttttaatagccactagtattccattgtgtgtatataccacgttttctttatccactcatccactgatggacacttagggttgtgaatagtgctgatataaacatataagtgcaggtatctttttatatgatgatttattttctttaaggtagatacccagtagtggaattgctgggtcaaatggtagttctacttttagttctttgagaactgtccataccattttccatagagtctgtagtgacctactttcccacaaatagtataaaaatgctctcttttctctgcatctcaccaacatttgtttttgtttttggtttttgtctttttaataatagtcatctgatgaatataagataatatctcattgtggttttaatttgcatttctccagtaattaatgtttagcatttttttcattgcttttggccatttgtatgtcttcttttgaaaaatatctattcctgtcctttgcccactttttaatggggttatttgtggatttttgttgctgttgttgagttccttgtaaattctggatattcattccatgtcgtagtcacaatttgcaaatattttctcccattctgcaggttgtctcttcactcgtttatttcctttgctgtggagaagctgtttagttttattaagtcccatctgtcaacttttgtttttgttgcttgtgattttgaggtcttaatcgagaattatttgagtagaccaatgttcaaaagaggtttccctaggttttattctagttattttaatagtttcagatattacatttaaggctttgattcatcattattaatttttatatgtggtgagagacaggggtccaatttcattcttctgcatatggcaatccaattttcccagcaccatttattgaaaatggtattcttagtgtatgtttctgtcaactttgtcaaaaatcagttggctgtaggtgtgtggcttcatttctgggttctctattctgtttctttgacctatgtgtctatttttatagaagtgccatgctgtattggttattattgcctcaaagtataatttgaggtcaggtaatgtgatgtctaactttgctctttttgcttagaattgctttggctattcaggctcttttggttccatattacttttaggatttttttttcccaattctgtgaaaaatgacattggtattttgatagggattacactgaatatacagattgctttaggcagtatagtcattttaacaatattaagtcttctgatccatgtgcatggaatatttttccatttgtttgtgtcatctacaatttccttaatcactgttttgtaattttcctcatagagatctttcatctctttggttaaacgtattcccagggttcttttgtttgttttgtttttttgcagttcatttaaatgggattgacttgtggatttggttctcagcttgttattggtgtataaaaatgccactgatttttgtattttgattttgtatcctgaaactttactaaatttatttattaaatctaagagtttttggagacatcgttagggttttctaggcataagatcatatcatcagtgaacagaggtaatgggctttaatattaagaagttgggcaaaggggttcaccaagataagttctccttctataccttctactctttcttatggagaagagacagagccatattttcatgaactttcttgcatgttgactcataattgttttcccctttcacatgtataaaatatatctgtttcttaagtaaaagcaaaatttcttgtccttcccatatgcttctctgaaccctttctatagtgctttgtgcatggcttttgaatatagtaggaaatagaacaggatagtgtttaagaggtcagactacttgggaatccaatgtcagctttaccacttattaactaactggacttgaataagttagttaactcctctgtgcctcagtatctccacctgtaaaatggttacaataatacaattatcttataaggttacagggagaattaaatgaattattcctgaagctcttaaaacaacatctggcatgtggtaagcactacgtatgataaattaagataaaatgcttgctgaatgaccaaatgtttctttgcacctacaataattaatattactcattaattgatgaggtttccttaacaaagacatggtttgtgtctttgctaaactgtgaaaaactctatctcttctttgagataagcagaaagataaataatagctatgacacatatacctatcttgtaagttgctttgtaattatttattacttgctgaaaaactcaagtgggcaaggggaagaacaaggcagtcatgttaacatctaaaccttattaaagtttcatcttcttttaaagtccaggaagacaaatgagctaccagaggaattttctttcctctgtaaggcttatacacgaatttgaacataactattaaagtaaattaaatgggatttagtaaatggccaaataacactgtggtgggagccaagggagcagacagaagcaaactatcaagtttgggtatgaatttcaatgtctaagatgaagttagacctagtctaacttcaagactcctacgtggtggctcatgcctgtaatcccaacactttgagagaccaaggcaggagaacagctggaggccaggagttcaagatcagcctgggaaatacagtgagacccccttctctaccaaaacaaaacaaaacaaaacaaaacaaaacaaaacaaaacaaaattagctgcacatagtggtgtgcacctgtaaacccaatttgatggtatctggaggcaaacagtggagcccctgtgcagagcactctccctttctaccatgtgaggacacagcaagcaagaaggcagaactctgcagaccagaagcaagctctcccacaacacagaatctgccagcacgttgattttggatttcgcagcctccacaactatgagaaaaaaatgtttattgtttacaccacatagtctatggtattttattatgtaagcccaaaataagacagaggcaatgaaaaaaaaaatcacacaaaacacttttcttgctctaacactatgactgtttgatgcagaatattctcaaaatttacaattaaactagataatttctggctctttatgcagatgtgattggctttgcttgatttgtgttacctgagttaacaaataaaaggttaaaaaaccctaaaaatatactgttaaaattgttcatatttcagaatctgaaaagtattttgggagtacaatttaagaaaattaaatataaaatattatgattctcaggagaagctatgtacagagttgaataaagccacagctgccttcttcatctaggtgagaacagttctttagggtctaggagcaagcatagcaaagctctgtggaactctgcctcatggtcatcaatagatgtgctctctataatacaggggtaaatcaaactcagtatgatttgcctcatttctttacttctctcagtgttgtcttctcttctgccccatgtccttttcctattattggtcactatgctgactttgtgacatgtcaacttggctacagtaaactacattttctctgaattccctttgttgtatatttcagattagggtgagccacaagaaaaattcttcagagatacgagtcgtgggcgtaaaacagcagctgttgtgtagctcacacaagttcttgctaatctgctggtttttaaactcgtgatctgacttgtctgagagcatgccttgtggacttcaagccccagcatgagatccagtgataacagccttgcagagactacttccaacctccacaattgtataagccaggtccccgtaacaaatctcatactggttctgcttccctggttgaaatttgaatacagtcactctattgaccaggacgaccctgttgcagtacatggttgtctgcagtcacctggctggtagattcctccaaatctagggggaaggactaaagggcccccaagaggctatagtgatgatgtgataattaattttatgtgtcaacttgagtgggctgaaggatgcccagaaaggtggtaaaacattatttgggagggtatctatgaaggtgtttcaagaagaaattagcatcaaaatctgtagacagagtaaagaagatctgccctccccagtgtgggtaggcatcattccatcacttgatggtgcagaaaaggtaaaaaggtggaagaagggcaaattctctctctttttcagctgagacatccaccttctgcagaaaggcataggagctcccggctctcaagccttcagactctggaacttttaccagtggcctcccagttctcaggactgtggacttgatctgaattacaccactggctttcctggttttccagctgcagatggcagatcatgggacttattcccatgtgagccaattcccatattaaacctcctctcctgcctctctatatatcctatagtttctgtttttctgaagaatcctgactataccaacaacttggaaacttagaagtaacaggtaataacaatgatgctgcggatacaaacatgacaggtacacagcatgtactaaatgtagggtcccagtactacagactcatttttttctcaccaaccaccctataaaataggtactgttattttatctccctctatactctgaggcacacatagctgaaataactcgccagtaagtagaaagccaaaattaaactcaggtactctggctccagaatctgtgctcttcaatactattgcaccattccaaatcaacctaaatgtaatgctttccatcctctggctaccctgacttttagaaatttttcacaacagaaaaatagtgtgctagcctgtgacagtgcagccaggaaacttctgttctggtcctgatttcaccactgactggctgttgttaaagcaaactaagtatggcctgagaaggaccgcatacttctgtatctgagtgattgtggatgaactgtaacctagcttaacaggcagactaataggcctaataacaggcgaatagactaataggccaagctctaaccaatccagccatctgttcctcacttccaatttctgtacgtcacttccctttttttttcccttctaccatgtggctgcgctggagtctctgtgaatctgctgtgatagtgggggctgcccgattcgtgaatcattcattgttcaattaaacacctttaaatttaacctgggtgaagcttttcttttatcactgtgtagcattgggcaggtcaggctaacttccttacttgtaaaatgatctcagtgccttcttccagctataaaagttcacaattctatggtgttaaagttctgattatgatgttaaaagatccttggaaaaaagctgctctgtacaataaaattaggtaataaaacctacaactgtatatttgacttccttgcatttatttttcagcctcttcctacctcaaaaattattctgtagctccctaggtaattataatagtgattttttaccctttccaattgtgaggaccctgttaatcacacacatgcaaaaagagttgtgaaattccatagaagaaaaatataaaattgtaagttgagaaaaaatacgatagaaagacatgttacacttgataatgcttttaagtaaagttaaatttcactaattataacaacatctagagacatttgaaaaagagtgcatattcaccgtacaggaaaaactttatggagttactgacctacaggattcttaacagttacctcttggttctcagttcccactcagggcgctcctcactggtaatcacctattacaattgtatgcaacttgttaaatgtaactatgctaaaaatcaatatatgctgaaagccaaaaggaggactgttttatatgccacagctttattttctttagactttactgcctatttttgtgttgttttgtttgtttctttcatggtttttaaattgacagatttttggtaagtattataaaagtttctgatctggagaagtatcactcctctttgtttttcttttcttttcttttttttgtgtgtgggtgtgtgtatcttcattgtcatttagcgaaagttcccctaattgttaaaaagccaagagtaagcatcaagttagagacagggaaaaagtacagagtgaaaagcaattttaaaaattgcataatcagtctaagaagagtagaactggccacttttaaaggccaaagtccaaacaaggtctttaagaatttggtaacaccaatggcactcaccagatgggttaaggcaacactgcaatgggaaaggtgacaactgctcagtagaaggcagacatcatgtaaacagtcgtactagctgttttcttgtgtctgagtctatgcctagaaggggtttactttttccacaaaaggggaaacatactatgatacccctgaatatacatcctagaactcactgcttaaagaacacatagaaaaaaacaaggtcatgcaaccatccctaggaagttaccaaaattcattcttagttcccatctgggggcaaccctgatgagatactgcaagggaagaaaagaagattaaaggtaaacaggcgtagttcaatatcaacactttaggcaaatctttcctgattatcctctactttttttttttttttttttttgagacagaatctcgctttgttgcccaggctggagtgcagtggaacgatctcggctcactgcaagctccgcctcccgggttcacgccattctcctgcctcagcctcccgagcagctgggactacaggcacctgccaccacgcgtggctaatatttttgtatttttagtagagacggggtttcaccgtgttagccaggatggtctcgatcttctgacctcatgatctgcccgctgcggcctcccaaagtgctgggattatcctctacttctaactctcaaccacgagctgaaacaccctcactttttctatattttgccacacttcagttatacacaaccatggtttgcactataaatatatggtacctctctgtctctcccattagaccatgagtgagggtagaggaactgggtctcattcattgatctgttcctagttcctagcacggtgtctaacatatgggaactgctcagtgaatgggaaatggaattaaatatatctattagtttgctctagagatccaaatttcaggtaggaatccaagggaaatttttccaagtatgcataacaattatcaaactttgtgtttctcacggattgttgataactgcctttaattgtatttaaagataggtagtattcttttgaaatgtcagaaaaggcaatggcaaaaagccttcaatttggctgtgatcccaattaaaattcttcaacccaaaagaaatagctttgatctgatcaaaatgtatgagtttctttttttgtcaccataatttaaagacagaaaaatggtatttaggatttacatatacatgtggaggccaacctcattatgatgattgtactgagaagccaggaagttctgaatcataaatgtattttcagaaaagaattgtattttcagagggggaaaaaaaagagctacaacaatagctctaatttaactggagatgttcactacacaatccccgaagagcaggataaattgtcgagagcatcagcagactgtctattcatttggcatattagcatgaaagggggctttttgcccagtggagcccaacctcttctctacaggatcttgcttttgagatctttgaaacaagtatttcaaatacagcatactgagatttgctctaatcttaactatggcattagaaaagtcattataactttatgcataagttgttggtgtatggccaagtcagaaatcttgccctgaggaccaacatctacataataagagaaaatagatacgtgtgcagccaattattagatacctctggtgatggcaactagaaactacgtgaagtcatggataattcaacataataacaatcactatatggaaaaatgttcctggctcatgcctgtaatcccagcaattttggagatccaggcaggtggatcacttgaggtcaggagtttgagaccagcctggccagcagggtgaaaccccatctctactaaaaatacaaaaactagcctgacttagtggcgggtacctgtaatcccagctactggggaggctgaggcacgagaattgcttgaacctggaggtggaggttgcagtgagtagagatcacgtcattgcactccagcttgggtgagagagtgagactctgtctcgaacaaagaaaattttgtaaaaaagtaaacgatgaccccacactaaaactatgaaaatcaaagttaaagaaaaaaaaccttttaaatcaatttattttaccttaatttattaaaacatgtacatttgttagacatttatgaaagacctatttggtgccagacaagggtgatcatctctaagactcataaacaagaagttgtaaatgttacctaatgtgatgtgccatctctaatgccctctggaacccatttgagtgtggagaactctgtggctgtctacacaacatccatttcacctcttgtatgtgaatatataaaagtcataggattggtcactactgattccctcttcacaggtagctgccctaatttgtcttatctaattaaggttatgttatcccctttgtcaaagtgattgggaaatatatcccagggataaaccaatcagtacatggcttttttcccagctacaagagattggttcagggaagagtatttaattgattttaggtccatgaaggtatctgggaagtgaaggctccctgggagcttttgtaaaggatagttctgcatttctcaggaactcatgtgagaaatttcttgggtgatatgttaagtagatttgtagattggattgatgacagccatttatccaccttgaaacaagccatcttaagaatgatgttaactcatggaaagagaaaagccaagaaaactacacagaaagatggagcctgagccttcaccaaattgcagcacaagctcaacctatgtctagacttctctgaacatacggcagcttgagccgagtttttgttaccggcagccagggcatcttaattattataactgtaacaggaactgtggcatcagagctgatttctgaaaggaaaataggatttagacaggtgaatggtaggtatgggaattgagagagccctttctgggacaggaaattatgggagcaaaagcaaaggggtaggaaaacacacggtatgttcaggggcgagtctatcacaccggatgagaggtggaaggtgaagctgacagtaggttgggggtggtgggggactttactgacccttctggaaaactaactagtggtggaatgggagttggagcagaggaggagaagcagatacaggtggttgttaccatcatctgggccagtgctcacaaggacccttgctcacaccttggcagtgaagatggagtagagaggatgagttcaaaggccatgccaatgacaagctacacatgatgtggtgtcgcacttcatgagaagcaaagagagtaagaaatggactatgaagtttaagtctggggacatctggtaaaggctggtgccgttaatcaggaatgataattcaggcaaaagagttaaactaccttaaataatattttttttctttttttttttttttccttgagacagagtcccgctctgtcgcccaggctggagtgcagtggtgcgatctcagctcactgtaacgtctgcctcccagatgcaaatggctctcctgcctcagcctcccaagtaactgggattacaggcgctcgccaccatgcccggctaatttttgtgtttttagcagagatggggtttcaccatgttggccaggctggtcaggaactcctgacctgaagtgatctgcccgccttggcttcccaaaatgctgagattacaggcatgagccactgcacccagactggaatattttctatataatttctttaaaaagtcatagaaacaacctaaatccaaactaacaaggagctgaatgactggataaattatggtacatttcctgaatgagtgaaatactctgtagtgagacattaacattttcccatgtgtgactcacttgtctgataatatttccatgccagacacacccccataataaaggttcctcactccatgtggctgcacaagggggtgggttacacgtttatttttcaacaccatctctttctttctccaccacaaataggtcccttggcactacacagttgaaaactattgtttgggaggatgtcaagaaaaattctttagacttggagaaaaatataaccaaaagaaactgttatctgagtattgaaaatttagaagactacatacacatggaaaaaaaagatacacacaaatgtgcttacagtaattacttctgagtggtaggatctagagtatttttttcttttacttttttatagtttctatttactttctaaaatgcatatgtatcaactttataattttacaaggacatcaattatattgggttcttcagaagcagataatgaaatgagggtttgtgtgaaaatgatttatgaggcagggaataatttttaccagcttcctcatttgtttaatagtgatgatgtgaaaaagaaaccagtgagtgagtagggaagtgagaatcatcaagggaagagccccagcaaaggtgtcctattaagcaaagtcccactgagggtaacttgagatcaacttctgctgacctatagaagctggggaatttactggccctcctctagtcagtcactattagagagctgcccccataaatacgtcaatgcccaggaacttctggttcttcttgcaggtaggaaaatgtggggacagagaggctgcccaaagagacacaggtgctggctgctaggagtaggcatgggcatggtaaagggatctgagggaatatgcacggaacaacgaccgcatttgctggagatgcttacaaaatcttactgctgtaattaataaatatggaaacctctgtttactaactgtgttcattcatattaaaaacatttacttaaaagaaagaggactaaatagtaatacattgttggccagcacttcttactgggaaaggagatttgaagagtcttacttttgtaaacgctttcctaagtgctacctgcaccttaaatgtcacaccttatattgctttatgttctcagagttcacattctaaaactcatacgttaggaattaggaccagtggatagaaaaacttgatgacccctggggacaccaaatgttgattgctgcttgttgttacagaggcaagacaactgaagtttggggagaaaaatctcccttcctgacagcaacatgccagaccattaagaacttttgcaaaaatcaatattggtctgaattattcaactggtgtgcaacaggatatagtggaatgtaaactattgggcttccaccaaagatttgtggctggcatccactataaatacacaaagtaactactctctagggaggaaaacagcgagaggagcaggaaatgccaggtttcagaaaattagccaaccaagttcacccagcataaatgctgatgcactgccatatttgctaatataaagggtggaccctctgatacattacatgttgagaagatcctcagcttcttgccatgtttcaacgtggactaaacaaagctattctatcctctgagcttttaagctcccttttcaataaataaatcacaaactaaacattttgaaagtcatctctttctcctgtccctgagagtccagtcataggtctacacagatggctgtcaaggtggtatgatttgaggtgtgctgggaaagtcctgtttgtccccaaatatctcccctctattggcctgtcagtcatgaggaatcaatcaagatagggcatttcaggaatcagaggatacagtagagaacaaaggttctgaccctggtggaatttatgaacagatttcaggagtcctggtttcccaaaaattatttgagaaataccatgtgtatacacatgagtgcatttccaggttagagaatccagggctttcatggtattttcagagtaatccatgacccatgaatggttaaggatctcaggactgagtcaggagatctggttctctatgcctgtctggctactggctggccatgtcatctcagaccgagactctccctgcacttgcttcagattcctgcatttttgaagactgcctggttaaagtcttggtgctccaccatgtctctgtgtgtaaagggccccctttccaagactgctgaggaaaatggccaaatgcttcttttgtacctgcttcctatggatccccctcagctcagggaatagtaatactttaagacagcattactggagaaaggtagaggaaaggggaataacagagaatgttagagaaagaagggggagagaggtgagaaagagggagagagaaatgcctctcactgatataggggtgtctgtgaggcaaagtcaaaacaccattgacaaaggtggtcttaggatcagtcccttgccccagcccccgcccattcattccctctcacttccaagtacagctgcaacattcaaatgtttgaaaattcattttttagaggttttcaattgaacaaggacaggaggagaggaattacttatgcgtgtatattcatgtttagtttttactttttaaattatgaaaccatcgtgtcttccaacaagtaataaagtacaagggaataattttttactggcttcctcatttgtttaatagtgatgatatgaaaaaaaatgaccttttaaaaacacttaaacggttaacttttgatctcaagtcttctccccacagcttaatttattaaaactaaacacatcttgacattataaattaggaaagttgagagggcagtacactataattagaagcctgggccaggcattctacagaacagataactacaactattacaagccagcttactgaaaattttattggatgtcattcatgcacaagtaatgaatgaagaaccaccactcatggaggggctgataatacgatgggtagggtgggtagaagagggaaaatctttctggcccctctctgcattctagcctccgggcttgagactcaccaccaacactgcttataaacatgaaagggattctgtttgttcaagtgctgtaagacctatttttttttacattagttaaatttttatttgtattttattttttctcagtttttttatttcaatagattttggggtacaagtggtttttggttacatggataagttctttagtggcgatttctgagagttcagtgtacccatcacccaagcagtgtacattgtactcaatattgtagtttttggctgagcatggtggctcacacctgtaatcccagcactttgggagattaaggtgggtggatcacttgaggccaggagttcaagaccagcctggtcaacatggtgaaatcctgtctctactaaaaatacaaaaattagctgggtgtggtggtgggtgcctgtaactctagctactcaggaggctgaggcaggagaatcacttgaacctgggaagcagaggtttcagtgagctgagattgcaccactgcactccagcctgggtggagtgagatgctgtctaaaaatatgtatatatacatagtagtcttttatccctcacccgcatcccaaccttaccttctgagttcccaaagtccattatatcattcttatgcctttgcatcctcatagcttagctcccacttacaagtgagaatatatgatatttggttttctattgttgagttacttcagttagaataatggcctccagttccatgcaagttgcagcaaaagacattattttgttcataagggcctatttttattcactatgcaactaatgtaccaggcataatcccacaggattacttaagagctcataatgggcttgagactagagatggtcctcaagacagagtccatttctggtcacccttcagggctcagggaacactgggccctagctgtgatcaaatttggtcatcactgctgcactctaagactttcatggggtatttacacttaaaacataccaaatagaaagacatggggttatgacctgtaaatccttgtagttggttaaatctattctaagagcaaaaagtaatatagaaactgaataacagtaaaaaaaataactagcaacaagctaaatgttcaataatagggtagtaaaatgacttatgattgacaggatattatgcagccattgaaatgacggtaggaatcattgtaggtatcattgtggtaggtacttatgatgaaatgttaaattttaaaaagtagtaaaaacttatttattctttttcaaagatctgggtctctaatcatgccacaagattataattaagaaaaaaagaaaaatatcccataaagaaaaaaaaaagttaacattttgccatggaagagaggtgttaagaagtgatacttttcttcttctttttcatttatttgataattatattatcaattatattacacttgtcttacttttatactgatacatatatttataattaaaagaaacattaatattacattcacatattaattaaaattttaaaatattttctcctacattaattcatttgctacataaaggaaaagtaagaaaactaaaagtcaagttgctagatttggaaactagagacagtgagtgaaagttggccaagtccccacaactgtcagaaacagagcaaatcctcaaagacagggttgttaatacccagtctagagctctttagcctccaaatcaaaaggctatttctggcagaaaaacaattacatctactagagaatgtattcagggaaagaaacatcttctgttattgtactggacctctgctgtttgtacctatccattccagcactatcagcatctccctgtgacttcctttggtggaccactcttcccacattcatggtccattcatacagttttaggcagtgcctaccctatgtcccaaggccatggttatgcaatggcccatgctggacaatcagtgtagtccaaccagtttcaagcttatccaatgagagtgagccctgggatgttggctggaatgacattctttccactggggcggcagaactggcaacacagaaatctggtgttcctaggtgaccctttttactatctggagagatcctgcctgagaataagataaaccagggagaagcacagctaagaataaggtaagatgattcctggtctcatggcctgaaacctgggtctagcaattcctgagacttgataacactggatgttacattttcatgagtcgacaaattccgttatctccttttaaggcaatttgaggtaatttttattacttgcaatcaaaatactcctgactcatatttctgccatttcccagcaaagtgtatacaaacattttctggttaaaaaaataattattgatgaaagaaaccattgtagttctatatcatgtagtcacaattgcctgtgttcattcatcactgttgtgatctatgtcatattcttccctcgggcaaaaatattttagcatcttacaagatgctaaataaaggggcaaatatgaaatgaagcaattacaactatttgttttgtctcaaatgggtgtgttatagttcctaattaattttggtaagtcaacaaataactttatatatgttcattcacatttgacaatctgaatatgtatgatgcttaaaaataagttttgataaacatatcttaattgacagagcagaaaaggaggtttcttaacttgccatctatatccaatctggatttagacttttcaataaacattaaacatgaaaacatttttattagcggtaattatacataatttagataagtgattctgaaactttagtatgcatcagaatcacctggaaaacttgttaaaaaaatttattgctggccactgctcactctctctccaggtctctgattctgtggggctgaggttgggcctgagactctgcatttctgacaagttcccaggtgatgtcgacactactggtctagcaaccacagttcaagaatcactgatttagactttgtttttaagttttgcattttgctgtaatttttatttggtgtaaactgtaatatatattttatgtctccgattaaaaacatgagcccacgttttctgagatgccgatataatttagacctgaaaattctggacacaaagataatgatgtgctttaaaggtggatgggaaacaacagagttaaagtaatttgggcaaaaccttgattaaaataattcattatggaatccaatcaaccttaatttccaacagatgacatgaccactcaggtattccgctacatcaagcaaaattcaggctcaaatgttctcctgctgcactgattagcaaagttcaccaggccaaagtaatcaagtataccacaaattcctaggtgcctttttatctctgcctaacacaatgcaactaagtggtctctgtctgccaacgggagtaactcttaggaagagcaacgaaacagtttgctaaaacctggttagtctgcaggaagtcattaaaatgatagaataattcaggaatctgatgatctccaagtacaatgccttgtcattttgtgattatttgataattccaatccacttcattcaagtaagaggttctgggactttaaaatcaagtagggtctgaacctaccagggtctgaactgagttttacaatgttaaagcacaacatcttactgtcttcctctggacatacccaaatgggttttctctgttggtaaacaatgacatttctccctatctttccattcaaggcttaaccactaatgaagtaagaatctctcatattttaacaactaagattagattatgacagaaacttcattaaaagtcacatgtaaaatatcctctttgattgcatatcaatttgaatatagtccattttaacataccttgtcaaaagaagaatatacattaaatgtaaaaatgtgccaatgttagctgcaaggctagtaaatcaccagttggcaataaggatatttatttctgtatagtgaggaagtgtgataacatagatgcaaagagctgagagaaagcttacaatctgcccaaacccctctttacacacaggaaggaaataagctcagaaaagaggaatattttatcaaaggagttcacttggctgtaaaaatgatgttgccggtcataaagtttttcattttcccagtggagagagtcaccttttcaacacatctgcagcagactcagagcagggtggacagcacagatgttgccaacagcttcaggttccagaaaggccctgagagccagaagacaccgatgacaatggaatccacccaaccaggtaaaacttaactgaagtcaacatgctgccctgtgatcaaatcagaaacaactgtgtaagaacaaggcgggtgaaaagaccttaccaatgagagttcagaaactgcagacatgagtacgtagcctcctggggctgggtgaagtgtgaccgcacacttggtctgctttaagagttgtgcagcatgtgtagaggggacagaggaatgagagtttgctctgctcttcactgctcagatgggaacttgagttgtgtttggccagatgccacactcataaggcatatggagaaatgaggtcattcagggagatggatctgaatggtgcagggacttgaaccgtgtcttataacgcaagagcaggaaaaacagtggttatctagcccaaagaagaaatgttttgggggcagggggaatatgggagttatccctgggtgagacaagttgtcagggaaagagggattcaattgttctacatggccttaggaggcagatctagcactcatggatagaattagtgggagacaggctggagagaaacacagagaagtaattctaaaaatgagagatattcaaagtgaatgacagctaaatacaattttatctaacatttttattgagtccttattttgtgccaatttctgtgttaaggaccttaaaattgtcatctcatttcatccttccaacaaccgtgttaggtacattaccatactgatttaaatatagagcaatgacagctggaagagcttgagtaacttgtccaaggccacatagctggttagcgcagtagcctggattagaactcagctatctgctaagcttctcgacctcaccacgatgttgctatgggctactttgggaagtagggagtttcctgtcactagggtgtccaatgtgggcaaacatggtcttgtaatactttaatattctcttccagtaggaagaaactactgttctatgctttgtcctgaaagagcgacattttgagcacgtagagctatctttatataaataagagaaaatgactctaaggacattgtgaacatgtcataggattttctcttggcccaaccccagccaagaagtcactgctttcctggaaccaagaggataaatgagggactgtgggcaaagggaagaccttacccaggcagcagagatgggttcaggagttagagaggctctttggattccagaggcaaagccataggataatcacctatggatatgatggagaaggccttgtgctctgggtcccacaacagagaaaagacttctagggagctttgattaaaactggccccaagcgggttgagttggccaagacactccactggggaaaggctgtgctgctggtcctcaggggacaggagaagggaactcttggatgacacactccctacacccagataagttcctggggaattatggtcctagtaaaggagctacctgaaatttctttccatagtcccacttacatcaacaaatactgggggatcccacctgctaaggtgaggcgggggcaggggtggggtggggaaatgatcataagcacagtcaggggtttctccaactcctttgcttggaaggaagacaggacagatgaacaaggggatgtggccacagtggcagcaacgaaatcatctagttagctgaaaggaggatctctgtgcccttgggaatcgatggaagtcatatcccaacagctggatgcgtgataagacactaagagcccacagcacgaatcgatggaagtcatatcctatcagctggatgcgtgataagacactaagagcccacagcacccagtgtcaacatccttaatgggtcacttctcttacaaactgggggaaaaattacctcaattttacctagagataataacccttaagattttgctattcactctaagaagaaaaagaagtgcctcttattgtaccacaccccatgctagatgttcaaaagatgttactttttatttaatccatttgcatatgtattattgcttccatcttttagatgtgagattgaaacccagaagtacatccccaaacttagtgagaggaccaggagttgaacccagggctgaaggattcaaactctttactcatttctaccatgctgcctcagtattacgaaaatgtcaaaacactaaggtgatgtccagcatcaaaacagtaagctctctctacttcttctggctataattggtaaaggcaagtcccattttcctttgtcaggaaattcatattcgtgtgatatttatcacaagagatttgcattttaatacagaactcttggacagggaggtggatgtagctaaacatagaggaaataagtgaaatggaagaattatagatgatgtcagaatcagaaaggaggggaagggaggttggccatgtgatcccccctcaggttgcctggtaatcaatttccaagtctgctgcagcaaaagcgtcaggagatgaggttccataagatattctttgagaaagaggctgtcctctggtagagccaatatgagtgaccttctaaggcacccagaggaaaacaggcaattgatactgtatctagagccatctttagggtgaagatccagattcaattcagtggtaatgagtaatgacaatgttttgctggtctttggaatttataaacctataggtgacagcggccctcaaaaaactatttatctttctaatagcgttgactatactctcactgcccctacatgtcccaaaaacatcttaatttctctgttgaaaagctgacaaggaaatgaaaacttaacaaaaaaagtgaactccacttcatgaatgttttatcaccttcataagtttatatatgggttgggtgctgtggctcacaccggtaatcctagtactttgggaagccgaggggggtggatcacttgagctcagaagttcaaggccagcctaggcaacatgacgaaaccctgtctctataaaaaaatacaacaattcgctaggtgtggtggcttgtgcctgtagtcccagctactcaagaggctgaggtgagaggatcacttgagcctgggaggtggaagttgcagtgagccgagatggcgccaccgcactccagcctgagcaacagagctagaccttgtctcaaaataaaaaagtttgtatatgaagccaaattattacaggatgtatttttgaaaagtgagagttataaaacattagatcaaaatggatgaaaaaagttgtggtgtttcttaaacatacatataaaaaattcagtctcacagggatatgtcatttctatttagaggatcagggttgttttgaatagtttcttatttgtcatatgctcaatgtgcattcaaatacaggtggcaatccttgaagaaaattaaacatgctgtgacttataaatcaaataggaggactataagaacgataaactttcaggttgttaatatgaaaattttttgaaaagtttttattttgggtactaaaaaaagttaagaagacatcctgtagattagttaactcttcataaaggtcattaaatggctttgaatagtatagctgatttaaaaataagatatgctaatttatgtactgatagagtaaatggaaactagcaataaagtaaaataagtgagtctatcctgggctttgtcacttcttggtttatcagtattaataataaagtgtaattttaaaataaagtgattccttcagcagatagtacacaattccctgcagctaaagaatggaaaagagattaattccatgacaattatcttggcttatcatccctttagcagggcccctctgcttgttttaaacctttctatttgtatgtgaaatctactgcctgggaaattaaaacaaatgttacaattcaacccagcgagctctgtccaataggaattcaaggtgaaatgtggctcactgtctcagccctccaggagcccaccgtagagaggacacttgttttcttttaaagcttaattcccagatatgggaaatgaagaattcacaagatttcacttcgggagatttcacgatagagcattcctttgctggtttcattgtcacctgccccaggtaactcatgaagtcttatgagaattgcctcttattcttcgggaaggattactatataccttctgctatgaaattaaccccagtgctgagatacacaaacttactacccaaactcaactcaccctgacctgagatgaatgggggattgcgaagtctttctctgaaccaacttctcagcatcctcacagatgcctcttggatgctcaagggaatacagggaagagaggggaactgtgaaaagtttctgtgggcagacttagataacaataaacggtaatgatgacagttttttttatctagccaaaatagatcccacttcatttactattttctatcgatgtaccctttctctgtactcttcctggtgcagtggtacaagcggggcttcaagggaaaagtgggcccctttatgaatggctggttagggggggaagcttggctatatgtggatttgcagctcattgcaacgtgattcatctcagttggttatgtgcagagaacagctggcagcaggtacccaactagttgcagagagaagttaaaagggactgttgcctgctgagagtgcagaggaattgctttaaggactccctgaagcacagcctgcagcgagcgaaggggcacaggcagggaggcagagaaccagcagcggctgacaggcagttagagaaaacagaaatcggccattcagagcaaaggtttggggccctaatttgagtccaaaaggtggaatggcaaatggtaacaagctcttggagagccccaaaggagaggctgtatgaaagaaatagcaccaccctccaagccccttaattcaatgccagagatgaaatgcaccagtacagaaggaaatcttggccaatgggaacaaggcctcgtggaagccccggcttctgagatgactacagagccaggtacagcgctccaccccttctcttgccttttccccacacctccactttggcaggtaggtagcagcccatggacacaagtaaatcaggtctaaagcctaaaacaccaaaagattaatacatggtgtttggctgattcactatgactgatttgttctgtggaaggaaagaaaaattcaagtaaattcaaagaggcctgtgaacttttggtacagtaactcagaagcaacaaagatccagagaaatgaaaagaaaagaaaagaaaagaaaagaaaagaaaagaaaagaaaagaaacatggtgaggaagaaggacaagacccaccccccaccctgccccatccagggataagaagaagcaaagaagctggtgaactggtgaggcctgggggccagtgatgaaggaaatcatccagaagcctaggaataaaatgtcatttaggtctcacagtctgcaatgaacacgtccttatttccgtattctgaggctttgacatctgggaccttgctgactctggaggggcagtcccttcaaggttggccaattgctagagacagtgaacaactcactcgtgagcaaattttgcaaatgcaagccaacccagagcccacaccacctccaaccagctctctctcactctcacatgaagggcccctgtgccccagagcctgctgaaatcattcaaactgccaactctagacctgttctccctgccttgcttgctgctccttcccacagaaaccacagtaaggattcctgcctgcagtttcccctctgccccttcctctgtctccagacagaccctgagcttcaccttgaagccccctcagggcatggcatccccctccttctgaaacctgtgagaataagaactatcttttcagtagccctcatctcctaagctactggctttgccatacctacataaagtaaaagctatatttaaaaacatggctcccaaaccatgtgtcgctaaaaaaaaagtccattctgatacctcattgaaaactgtcattttgtaacaggtgaacatggaataaatacattaacgtttaggctgggcgcagtcactcatgcctgtaatcccagcactttgggaggccatggcggacagatcacttgaggtcaggagttcgacaccagcctggctaacatagtgaaactccatctctaccaaaaatacaaaaattagccaggcatagtggtgggcacctgtaatcccatctactcgagaggctgaggcaggagaatcgctggaaactgagagatggaggttgcagtgagccgagatcatgccactgcactccagcctgggtgacagggtgaaactccttttcaaaaacaataaaaaagaaaaagaaaaagaaattactttagtctgttcactacacctttactcctagattgtatcttactaaaaatatttttgaaaaagtctccgttttaaaattgtgaactgaactagttcaagatccacataagatgatcagataaatgtctttttatatttttctccaagaaaatattatcagtgaatttactgaatttatatctggctggcatcaagaggtttcaatattacataaatgttataatatcattattattcttcaatatatgattattaaatctattgtaataattacatggcgatgagcatggcttagattccatgtgatgatccatgaagctcttatacctttgcaatgaggcccctgggatcagttttcagacactgaggatggggtaaggtcataaatgggatgtgcattcaagaatttacattcatctcaggaaataccccgacaccacttttggggaaaaaggaaaaaggctgtttgttttcttatttgtctttctctcataaaactagactgcagggagattttttggtgatttggatttccaaggaacccattttatcatacgaacttagaaacacctgcacatcatatgctgtttgcctgcagttgcttctcattttaagctggaattacctacagagttacctcccccaagctactacactgtatgggaggcagtctcctctaaatgaattcctgatcatcttagtattttatgagattaccaaaaccaatttgacttggccccaggaacctaagaagcaaaaaacaaaacaaagcaaaacaaaacagaaacagaaaaaaaaatgatgtcacaggaaaaggtatttttcctgtttctaagaaaggtcttgtggatatgattacaaatgagacaaaggtaagggaaaagactctatcttgggaaaaatgatgcaaaatttccaactgctcatgttccttgctctgttcttaaaaatatgtcttctttactttgctgggttgagatgctgttctctcaaaacaaaccacggacacgtgttacaagctgtatcttctttagaaacacagtcgaacctgctttctagaggagcccctgtccaccgtgacagctgagcagcagcacttactgactctgaaagggaggctgagcctgccctgggtgtgctgtaactaaggcgttccaattccaaaggcaaaaatgctattaagcagccaaggatgtttaaatctagaaagttcaattcataaattaaagatgtatttcagatatttctgaaacaggagtaattaccaaaactaagactgtagagactcttacaccatgacagctggtgtttataatctctcctcccacatccacatcttaaatctctggtcctttatcggacttgggtcacactgctttggttataaagtaaaactgcatatttcccactccctttgtagtgaggctctagggttggagctcatttgaatgctaatgaattagatcaccctcaaaaggttgctatcagaaatcagactacgtggatattttacagcatttcatagtttcagggtgatcgtgttcctgactcagcaagtcaagccaatacctatataacaagggcatttttctggaccccattctagagccacaatttttcccccaaggctatgtaacattttctcctggcaaactattagagttaatagaatgctgtggttctgttctggggactgctcatcaatcatactgctttttgaatcacaacttgtgtaatttttattcatgacacttcagtaagttactttgaagcatcacatctaaaacaacccagggactcactaaacaaaaaaacaaacaaacaagatttggggttttgttttccacttctactcatgatatactaggctttaacttactttgtagagtaaggattaaaatgcttaattggctataactaagcaaactgaatcctttagatgaatcaagccagccagctttcagtttctgacatcaaaatttatgctctgtgaaaaaaaacaaggccatggctacataacattaaaccaacacacaattaacaacactttgttctaattatctctgggaacatttaatgttgcccctatagttcatttttcttctttgatagctcttagaatatttatggagattagtccttgatgcattggccttctctgagatctggggttttcttagaagctcccacacaaatctgagccatgcaaagtaacatatttatgcagattaattcttgacatattggctttttctatcatctaaggtatttctaataagcttctacctaaatctggccctggcaatgcagggcagtcacagaccccccccactccttggcttacctcacactaagaatgtttttttctttctctcagcagttggtcataactgataaaaggttatgtcttgattgaacaagcttccaggagttggaaggccaaaagggctgctgtaaaacagcaatggagatgctaataaaacccaaggtaagaggaatcttcggctgcctattactgagaaacctaaattgcagacaagttcagcttcctcacatcaatagtgagagacaggccacaagaaaacgagcactgatcaaaggcttttgatgatggtagaacttcaatttatggaatgcacgtatttttctacactccaaaggcgtttcttctgaagtcactgggggcattcactttaaagtcataaatattctctccatagctcaggatggtttgcagcgccacttggcgtgtttgtttgggcatgtgatttgatgctctacagatggattgaagcaccacgaggagcttcactgtggaaagtgaaggggctattagttaagaacacctctaaactgattagaggcttgctgaggcaactgcatgagttttaaacatagatgttgttagctcttcatactgatgtgttggatagataggtagttccatgtactacctatctatccaaagagtgtgaacaagctaagtaaccaacagtgaggattaaataaatggcacttgcacatataaacaggccgagccacttggcctcatctctggccataggtgccctggcccttgacaggcccatgttctgagggctccttgaggctgtttcaggcttttctgcttttgtctaggcaattccctctgctcttcattttaccatctttgcctggagaactggcataaagcctcaaagactcacagttcaagtgcaacttctttatctctttgcttcctccaaaactaattcagttagatacttctgtcttggtgctccactgagccttgtacacaccttacatttttctaaaattttaatgtgctttatttttattaccttaattaattagtatatttttaattattatatttttgtcttctttccaacaatgtgagtatctcaagggcagaaaagatgctctgtatctctttgtaattccagcatccagcaggaggccaggcctagaaatgccaaaggagggagaggaaggtgtgctagagagaagacagacaggcagacagagagagagagagagaagagaaaaagaaagataatatgccacagaaggggaaaaaaaaaataagcagtaacattctttctgggtggtattaaagtaattctgacatttaaataactaaaacacaagaattttgccaaatctttgatggaattgatggaactgctggttgaaatgctccaccctccagaggccaagaggtgggcctacaactgaagtcaagccaatgagatccctctctctggactgtaggagctttgatgggatgactaggaaagagacatggccttttcacggtgctgctgatttggtgccatcacatagaaaaggcctgcctgagagaggaactagctcaaatgaaagcagaactgagagttggagaaagctttctgacattgtctgaacccttgcattcatccatgtcttgttacagctgattgtccagttatatagccatccttccttttagttaagtcagtttgagtagtgtctctatgacttgcaactgaaagagtaatcacaaatagaataccttgaaggaatactaagatttcccacagtataaagttttcccaagattttaggtctttgaaattgtttcagcagcccacggaccctctcaatattgtatcctatactgagtgacaatggtggccccttggagcatgtgggttgggtgctctttgcctaactgtgctgcctccatcagcttcatttctgggattcttgattttggttcttaaataagaaatctaactgtctatggacatgactgctttaaaagataatggtatgctttaaatattctatcacaatatgtatgtataaagacttaggcaccaggatgctcataagaacattataatattgaaatactgtgaacaaggtaagcagccaacagtgaggattaaataaatggcactcagtatccattgaataaatttctacatagccactgcatcatatttttgaaaagtattgaataatgtggagaaacaggctacttaactgtatacagtgatatttcatatatcctaatttgattaggtacaataataacaaaaagactagaaatatatatgctgaaatgccaattccagccatttctgattagtgtaattacaattattttcttatgatttttccaattttctgtaatgtgactatttactacttttataatcagaaaactgctagtacaaagttacataatgacatagaatggaatttttctaaaaacttcaagcccctttaccaaagaatagtttttgtctcaaatcctagcttagtgatgttgctaggtgacccacagttggatgtaaaacaatcaagagaaagataaatgccagatactttaagacagggatgtctggtgttacctgtcagcaaactgtcatagaatctaaagattagaaggaaacaattatgaatttctattcagaataccactggcacgttgccttaatttcttttacattgtcttaagataggagaggataaaagtaagaagaacaaggtaagaacttaaagccaattagaaagggaaagaaaatagcccgttcctctcactggcaaggagacaaagccaaacttggacatatccgtggccatgtcaggggagccctcaaaggtggcatgaagccactgaagagcactttggatgatgacctttccccaggcttcaaagcttgtggcactgggcacatgtgggaagggcctctggatctaagtctgaagacccagggaaagttctacttaagaggaggcaggggcgcagaaaggttagattacaaggtggttaagatcagcttcatccatctctgaaaggacatgaattcattcttttttatggctgcatagtattctatggtgtatatgtgccacattttctttatccagtttatcattgatgggcatttgggttggttccaagtctttactattgtaaatagtgctgtagtaaacatacatgtgcatgtgtctttatagtagcatgatttataatcctttgggtatatatccagtaatgagattgctgggtcaaatggtatttctgcttctagatccttgaggaatcgccacactgtcttccacaatgattgaactaatttacactcccaaaaacagtgtaaaggtattcctatttctccacatccttgccagcatctgttgtttcctgactttttaatgatcaacattctaactggcttgaattgacatctcattgtggttttgatttgcgtttctctaatgatcagtgatggtgagctttttttcaaatgtttgttggccacataaataagatcaatgaaagcagagagtagaatgttggttacagaggctatgggggtgtgagaatgcagacagggtggtcaaagggtacaaaatctgttgataatagagtattacacatctcaaaattgctaagagtccatttcaaatgttctcaccacaaaaaatgttaagtatgaggtgatggatatgttaactagcttgatgtaattattacatgttgtattatcaatcataacatcactctgcatgccataaatgtatctaattataaattaccaatttacaatttttaaaatgaccagtgaaagcttgttgggtttagtacagaactggacctaagttgttttgatagctttaaatgtcactctaaaagtggtttctgtggttctcaatcctggctgtgcatctgaataatccacagagtttcagaaaaatacagatggtcagtttccattgtagacttaaaagagctgggatttcctgggttacattctagacatctgagtttttaaaaagctctatttcttctgtggtttcatctccctagcctgcttgcagatctcattcttgcattcatacttctctctcccgcatcatcgatttcgccctctccactagaacacggccattggcacacgaatgtgccataccatcagctgccttttgaagagtttctcttgtaccctatttctcttcagttttgactctctccatgtctgacccacttcaggcctgtctatacatgtctccacatgttttcctccacgcccactcccatcagaaactgttgttaccgaggtcatagctgaccatgccttgccagagccgaggatggattctgtgatccatcttgctggtgctcttagcagcactcaacaaggatacccttggagcactttcttctttaggctgctacaacacttcaccttccattttcctcctaccacaccagacactctccccaggctcagatgctggctcctcttcctctgccagacctcgaaaaatggggaaccttagaactctgtcctctgccctcttcttgtccatttacagttacttctgatgggaccttaattagtcccacaaggccgagtgtcatctgtatgctgatgactctcaaatccatatctctagccctgacctgaactttgtatttccacctgcccatagaacatcatcacttgaatgcttaataggcatctcaacttaacgcgggcaaaaaccaacagacaattgcatgctaattttgctaagtcacctttcctccaaggcttgcctctctcaggaatttggtacaacctcacactcagttgctaaaaccaaagaactagaagttatccttctcacttttttccttgtattccacatccaatggatccgtaattcctaatagaccttacttctgaaatatattatctggctatttcttactagcatagtatagtggagctatacattgggagttcaaattctgactctctcactgactacatgaccttgggcaaaatttccaaccttctggggctcactttcctcatctgtaaaatggggataatagtgctaactactgttggggctcagaaaaaatatccccaaatgaaagcctcagaagccaaagtttttctctgatcttgtcctcctgtctcccagcttcattttcccctagtctagtcatagaaactagaatccctcttccccaaggcaggtcaaagaaaccagaaagctagacataaaacctaaaaaatattactctaattttccttctgcttttctatgtaaaatctgaccataaggaaattatctgacctgtcttgtttgctataggtcataagacccctattctagaagaggttttgccccacacccagaaggaaggaatgctgcaagcagaggccaagaagaatctagacaggcaggcctcacagggtttccacactcagtctattaccattagatcatactctttttttgtacagtcatctttctacacggctctctatactccgctgaacctaagcataaaaatggacaatttctcctgtgtctttgagtccccgttctgaaggctcctatgtatacacattgaaaataaatgtgtatgccttttctcctaccaatcagttggccttatgtcaatgattttctgtgaacctctaggcagccaagggctcccgctagtccccatactaccataacccacagggttacgaacatgaaaatagcatatataaacataaatggtaatcagaacagtgtttgggatatactaagccttataggaaggcttgccaacatggttattattattcccattacatccctctagtccaataacattaatatggtatgattatcattccctattagtcctaggcacctaccctagactagtctactaatattgtttgtttgaatctaaaaacaacaacaaaaaataccttctacctggtctccctgcccctcctatgtcccactattagcccacaaagcagaaggatttgtctttataaatgagaagttacatcattgcttcttcccagtttaaaattctctaaatggcttccttttacatttatatcattttcagagtctttattgtgaccatggcctatatggcttaaccaggtctggcccttgtctacctctgtgaactcatcttcttccattttttaaatcttgtaccttgtgtcccaggacagacttcttatttctgttccttggacttgccaagctttccagcatcttcaggtggcctttcacctttgcagctgcctcctcttgcaatgttcttcctctgatcttcacactgctgtctcctttttattttttatattacacacaaatggctgatgtcagaggtcttctcaagtaaatacctctcctacccctagctcacattctctctgctactacctcaataaacttttcttatttacaggcatatagttgcctgtttgcttatttattatttcatttaagtatatgcttcctgtgtctgcccactggggtggggaccaaaaaaactgatctaatccctgtgcaaagaacacgtttggcccatagaagatatttaatatatttactattattaaatattatattatttatatataaatatattaataatatattaataaatatattattaatatatttaatattaatatatatctatcgactaccagttctacaggtaattgtgatgcacagccaggtttgtctattttgaactacctaattttaaataggaattaatgattaacaaaatgcttatgcacagcactgtaattgtcatcatttcatggaaaggtataattgagtagaaaaagctgttattcaccttaacacatttaattgccatatttttctgcacaaaataaatcattcctagaagcggccaagttctttcaaccttgaggctatctagctaagtcatcagcacatgcttttaggcttaggactctcaggtggtggcgggcctgttctccccctggctagaagctgagtatcagagatgccatgggagttgggagtgagccaagggaacatccagcttcacttttagtcaggtgtgcagttggtccctgagtggagagaagggccacgtgggagtgtcaggagtggggcctgcagacaaacaaatcatgtctttcaaggaacatgccatgagcaaatctggggcctgagtggggcaaatgcccaggagtagggaacagggaagactccagatgaagccagtggatcctggagggcaggtctgggaagatcccttgaatcagtggcttctggtggggtggcagaaaggagtgatcctttcgtagaagggacctgagacatggcagtgctgttgagaatggtgagctttgttctaagtcaaataaacagtctctgaaacagcagccttgaaaacccaaacttttaaaatacatagaaaatgctacagtcaggcactgagaagttacataaaatgtgcaagtggcatccagattgtccatgtgtgccctatgacaccaatatacaccaagtgatttctcctccaggcaccaggaccctaaacacaaattacaattgaagcccaggggaagcagtggctgggtagtgagggtaaacggtctactcttcaccatgaaaagctggcaacagctgaaaccaacgtactcagtagagaaaatcaggctaaaaagagaaagagagagagtgtgtataattataatttttataattttgactgttggccctggaggcgtttttaggaaggtaaaggtcttaattagcacaatattttgctgagcaggcggatgatatggaatgagcccatgacatggcatgcagagacctagacagctctgcaaattaaaagacagaacttggctgtgggagaaggtgtctgagggagaggagagtaagtgggacagagctggccacgttctaaggcgggatctgggaactgaggagaaaggctactgcgaaacgccctgcaaccaaaggactgggaggaaacagaactatcaaaagacagagttgaaggcccttagcctccagaatattctgccatgaccccatatccttcctagggttggattttggaaaaatcaagtaaagggggctctgtttcataagaggttggtgcgtggagaagaaagaggaattgattgacgaatgtgagtcggaacttaccccagaaatggtcacaagagggaataaataatacaggggtggcagctggagggtgatttgcttagacaatattaacttaattttcaaagtcaggggctcctcaagttgtttttgaatattactgtcacagtaatcaagaacgtaatatagaagtcatctctgcatttcattttccacaccttcttagaacctgttaggggagcaggaattaaagaagactgctgtccaccaccctgaaaatcattcctttctgtgatccacaacaccaggggccaagagattagggcatacaaatatggtcatttcaaaaatacgctgatggggtgctggtggtatattggtgagcctagctgccttccaaaaatatgctaatagaaaaattctttgtttttttaaaatcttgttgtatatcaaatttttccaaagtaatttttgacacattataattaattcccctgcaatcttccaggggagcatttcattaaagcataaaaatccacatggggtctgtgaccagctctgactgcagtctgtcaaaatcagttctctattttcctacaataatgtttaacccatgcaaagatcctagacactgagaatatggagcaaatattttaaaataaaaaaaattaagtagcatataaaattcatatgaaaattgaattacatgtatgacaaaatgacatctatatataagaagatatatttatatatatttacaaacatatatttgtatttcttattttacatactttattataaaatgaaataatcttcttattacctgttcaagtagaagatagtaagatgtgaaggcaaggagaaagttcatttaatattgaacaaagaattttaggaaacaagcagtgacactatgactataggaaaattaaaaaataaaatagttttatgaattaaaatagtgggtcttaatggcacttacagatatcatctattgcattcaactaatgctggaatcaagagttgttgcctgaagtgtaaagaactctgtggaaggaaaaaagatactgcttctcttttactcactacagtttaagaaacattcgctgccaaatacattttttaaagacctcttagcttaatgaaataaaatgtacttttcaatgttgtctctaacaacaacatgaactaagattaattttctctgtagtcataaacaaaaactaacaatttaagtacactgttctctgggagtaagaaatgataatatcagctctttcctattgtgaatctagttaattcaacctcaagataaagttatgagtttcttaaaactcaaataggaacctcagtttcccttgagaaagctttcctatcttttatagtgactatctttaaaaaatgacgaaagaatgagaacccttggggagacaagggtgattcctagctctttgcccagagggagttgctagcgattcctttagttgatatttgttctgctctgtgtttgaagctacttgcttacctgtctgccttcggtcacacctgtgtggagtagcccaactctttcattcacagtccttatattgttaatcactgtgcccaggtaagtaggaacaaaattaaggaaaaggagcaggtttggtgtggatgaatgaaagagactatgcaccaggcatcattttaaaaataattacacacgtaatcctcgttacttccctgtaaggctaattactattactatccccatgctttcagctgagggaacagaggcatggggagcctaagtaactttgatggtttcaaatctagaaagtagtcgaacagggattcaaatcaaaccccaagaattgagcttcaaagtgcataatctcaccattctgctttattatcaccgaggaaattagtgtaaaatggatatgctcattatagacaatgtggtagatctgaggtagaattgcagaaagcaagcatagaaaacaaggcccctccaggtctttttgtttttttgtttgtttgtttgtttgtttttttgagtctgtcacccaggctggagtgcagtggcgcaatcttggctcactgcaagctccgcctcccaggttcacgccattctcctgcctcagcctcctgagtaactgggactacaggcacgtgccaccacgcctggctaatttttttgtatttttagtagagacggggtttcaccttgttagccaggatggtctccatctcctgacctcgtgatccgcctgcctcggcctcctaaagttctgggattacaggcgtgagccaccgtgcccagcctccagctcttcttcctttatgctagtagagttttcaggattctgtagactctatggtagaactgcgtttttagatgttgggtgaaggccctttataagcttatcgaaaggacgtaagtgaactcatagaaaaaaaaaatctttgctgagtctttaagcatgtgacatttcaatcaagaactagtaactagaatggtctttgatgactgctataaaaattcatgaattaacacttgaaataatgtcgaatgccacgaagtaacagacgggtgttatcatatcccggtctggaggtctctggaggatgtcagtgctccaaaaatctccttaagtctccttagccagtttcagctcactgttagatgctttacacatttaattcctgcacgttttttttaaagatatgactatactgcttataaaatctctgtgtgtgtgtgtccaatcatctttacatactattaaatattttgcttagtcattcattcattcattcattttaccagttactggggaaaacaaagtaaaatatcacatagcctcttcccccaaggagcttgcaattttaggaactaatccagtttgagggctgaatttaagttaaaatcaattactgccctatgtactccttttaaaacaacattaggtcaagaccctttcagtgctaactttttgctcattgtagacaaatctcagcaggaaatcgtagatcatattagtctgggagaactcaaaagggaagatttatactcactcaaaaccagtgccaataaaagaagcagaatactgttatttttcttgaagagtgtaaaaattgcttcatttcttacctctagagctttcaatctctctaatagcaatttggtcttttcttttccctcatctgtactgctgctttcactcctcgaatcctcatcaaccaccatgtgaagatcttccaaagcttccttatgttttctctcttcctctgacagcttttcctgaagcaagaaagaattactgttttcaataatctccagtgaaaaataagcatgagtgtgaggctgaaaaggctggaatcattctcctgcgtgtgcattcttccggggctgggagtttgctaaacaaattctgagaggggtttattttaaaaaatgaagtagatatttttactgacccctggaaggacaaggccattgggttgccatctctcaatgcagttgtcctttgcacagttggagaagtgactaagccagcaaagccataggtggagtcatgtggttaatccaattttatctgcacaatgaaactcagctatactgcaaactgtggaaaaatacatcaattttgataccttcatttgtgaaaggcatagctcctcaagatagggtcattaaagtcactggacatgcagccatttaattaaaagaatataaaatatcacaaaatactgaaataagagtgatttcagaattcaaagctcacacctattagttctttcagctcaataatgacacaacttttaaggatccctcagtccctttctgtaacactgttcagcattcgtactatggccttgaggcagacataaaaagttattttgtcttgactcactgttggaagcccctcactcaaccttgtctctggaagctttttgaaagttgagaagtactaagttaagcctcatgaatagctcttgttttcaagggaaaaagaagtatcaagagattaccatattaaaaaaaaaaggatccattttgtgcatggagactcttgctccccacaatcaggtgacatccttccattacactatttaattctaaacacaatgctgcagaaatctttgctttaatgtagctggttgtcaaccatctgaacaaaactggattatcagtggtaaaagacttctctatattttaatactaaactaagatctatttgcaaatacagaagcacaaaacgtatcattcttaccctcaaggagctcatacaatctacttagaaaagaagaacataagaagaaaaaaaaaaccacggcgttttcaaactgtgctcatcaaggtactttgaaggttccaaaaatatttaagttactttttgaaaacaaattatgaattatgtaaaaatatgtcttaatgtatatgtatacatttatacatatatatgtatcagtgtatacgtgtgtgtatatataaatcactttagaccacaaagtcagtgaattcatccatgtgaacctgttatgtacagatttcaggatctaatttctcctgtcatctctgtatatataaatgcatagttgattagaaaggttgtagttctttatgaaatcaggcccaagcatgtgtaactgtataccatgtgcaggtgtgagttcagctcagataaatgccaggcaagtttaagatgtacatccacaggccaggaaacaagtccaggtcatggtagcatttttatagctttgattttttagggtttggtcacctgtcagacttacatttccaagataaggaatatgaagtttgtagatactgttcctaaacaaagaagtacctttacttctcttttgtggtttgggatgactgtaagtaaacactaacttaggttgatgaagcaagctgttttaaaattatcttcattttacttttctgtatatagtttttcattcatcactcagcatatgccacttatattttatacatatacatatgtatatatgcacacatacatatatccacacatacacatacacatatacacagtcacacattccttaggagatttcatcattgtgtaaacatcatagagtgtatttacacaaacctagatggtacagcctactacacacccaggctatatggtacctaggttagaatcctatataccatgttactgtactgaatactgtaggcaactgtaacacaatggcaagtatttgtgtatctaaacatatctaaacataaaaaaggtacagtaaaaacatggtataatcttacgagaccaccatcacacatctttataaggtacatgactctttgtgtgtgtgtgtgtgtgtgtgtgtgtgtgtgtgtgtgtatctgtagaagtatcctgtaataatcagagcccaatagctaattaaaacaaagaaaagccattggggtggtaaatgaaaagccaaaagactttggaatgtgacagccagatttcaggtctaacatttatttagcagtttggcaaatgatcttacacaaacttcctttatttttggaaatggagactcgctctgttacccaggctggagtgcagtggtgcgatctcagctcactgcaacctccacctcccaggttcaagcaattctcctgcctcagcctcctgagtagctgggattacaggcacctaccaccatggccagctaatttttgtatttttagtagaggcagggtttcaccaggttagccaggctggtctcgaactcctgacctcaggtgatccaccctcctcagcctccgaaagtgctgggattacaggcctaagccaccacacctagccttggacaaactttttaatttcaataagtcttgatgtctttgtctcctaaactcctaaatgaggctaatgtcaacatatatacactcacataccatatagtgaattcgtgtcattcacaatggttatgttctctaaaattttcatgaacagtacaccaacttaggaaatgtgaaattattgttcctaggggacatacagagttaggttcctgtgagcctctggtcacattttcattaaccagccattatataatcttgttttatgtgtatttctatttaaagacaccttacatttaacatatactgttgattcattcacactgacctaacagccaacagcactgtaactcatcctgaaggaagcttatccgacacacatgtattttatctgtagggcgcatcacagcctgcatgtggttaggaacaccagacagcacttaagcactacactcagggccatgtcaaacagtgaaatcaccaacaaaaagcacaaaatacaaaaagcatatcactaaatagaccacaaacaggatactagtttattgcatgaaagctaaaacaacaaggcacagtcagtgctgccttgctccatctcagctagtaacgtgaaccttgggtgactaatttttcaccattccatgtatgttcacgaatgaccacaaaagtgacacaagtatggatttttgggttgcaaatacatttttgtgagtagaaaatttgcaaatgcagaatctgcaaataatgaggagccactgccctatcgtacacacacacacacacacacacacacacacacacacacatacacacacacatacacacactcttaaagtacctagatacagtgcccaagtattatgatgtagaaataattaaagacaatatggattatgtatcagtatttagattacataaaacgtcagggtcactttacataatttgaagaaagggcaatcaatgaaagctgtgagacatgattctatggaaactgaatgtgactcatactctaacacagtgatacaacttaaatagttagagaggcatagggtcggtgtttggtgaaagagaaaattttaaaaggctcctagtcaagagtaagttttgtccttacaggtttataaggaaatcagtttgattataatagagaaaagctttttgagagaatagttgaataataggattggggagaaaaggagggggagaggatgcttggaaatgagacaaaaattcagatacaattcactcatttgttcatccaacaaatgttttgttaaacatggattactggccatttgctgatctagctaatggagtatggaaaacaagacaaagttcctatattccatgaaattatattctaatgttggtaaacatgacaaactccaaatcaaatctgtaagtaatataaggtattagtagctggtggtaaatgctatgaagaaaataatatcatctgatagagagtggtgtggttaggggcaatgttagatgtgctaacaacagagtgaggctgagtgaggaggtggccattacagcaaaggccaaatgatgaggaggaagtagctgtgcagtggtttggggaagagcattcccagcagaaggactagcaaggcaaatactcgtggcagggccaggcctgccttgctggccagctgagggagggtctgtggtggagcatagtgtctaaaagaggaaggctagcaggaaatgagatcagaaagagagctggaccatagagggtctttctaggcataggaagaagtttggattttattctaagtgcactaaagaggaactgaagtctagacgtaggggagtggtaggttctgatttacattttagaaacatcatcctgactgctgcaatggagaatgggctgtggaaggaaggagctaggagactagttggaaagtctttatacagaaggaaataaaaatcaggaatattttgaagggattgaatcaggacttaccaaaagcagtttttacggtggttcagaaactaccacagatgatgggtcagatgccctgaattcagtgcttagattttacaactttggaactttctgggaaaatcattccaactttttaggcctcagtttcccccagagataaggtgaggagttggactcaatgtctcttccagtgttaaagttctaagaattcaattaagatacagttttcagaaagaaaacgttgtcaaggcactcagtggtagcagaaatgacaagagaacagaaaaaagcacctctacattttgtaataagaaggttgttagtgggaacttgagagctgtttgactaaagtgtgacaatggtacccaaattgtcagtggttaagcaaaaagtaaaaagggagaaaatagaggcaattttctcagatgctcatttgaaagtttggcagggaaggaaatctaaagaactgtagctgaagggcattgtggaggcaagtggaaacctttttcaagatagaaaaaaatgaggttgtctgaagaactaaaaagaagagggagcaccagagagagtagcaaaggtgggaatgtacgaagagatttctaaagccaagaaggcaggggatgaagggcactgatagaggagccaaggtttggaaaatgcagctccctgtaaaatatcactgacttatttacttatttattttgagatggagtctccctctgttgcccaggctggggtgcagtggtgcaatctcggctcactgcaacctccgcctcctgggtacaggcgattctcctgtctcagcctcccgagtagctgggattacaggcaggtgccaccacaccaggctgatttttgtgtttttagtagagatggggtttcattatgttagccaggctggtctgtaactcctgacctcaggtaatccacccacctcagcctcccaaagtgctggattacaggcatgatccatactgcgcccatccccctgtaaaatatcacttacagtttaatttctcagttagcatttctaaatcattagtgtctagcctgaattcttagagaacaaggaattgagtacaagcagctcatttgggagatgcaggaaacaccagtagggaggtagggaagtgactcaaggaaaggaagaattatctgaccccagggtgagagagctgaggtgttggtgtcccaaccctggaggagtcattagttgaggccagctcttgaggcattcatttcctggctcttctagcctgctggaggcagtgaggctctgtgtagttctcaagtaaaagtgctctctgacacagatccttgcagctggaagtcgcagggccactttgaatggtcctggggtgcaggtactgctgatgtgctcgtgacaaagagagtttaaagctgctctgatgtaacgccacccaggaccaaaagccacatccgcatgctgctcacagactagtcactgacctaaaggcatacttgcctgtgctctacatgacaaaatgccctgatgcaaatccagaaggtggggttctctcttgtttcttaatcatttaagattaatcttttgtttcttaatcatttaccagtgagagcattagaatataaggtaacattgagaaagagagaaaatggaagggacgtatttagagtaagtgaatgagcaaaagaaacaaataggtggagacagaggtagaggaaagacctgagagagcggagagaaacgtggctataccctatccacagatcaccatagtccattttagatagactagcagttggatttatcctacactcataaaaacacgacagtattttttaaaaaatcaagtgtatgggttctatccaaaaataaataacttattttaatcagaaaaaatatcacaaattttaggtcctttgccaattaagaatctgagatatacacagcaaaaaggatatcagacagagaggtcaaaaatgtgtagtgctaaatactgtgtatttgtcttacgaacctccaaaaaggaaataagaaaaattagccaggcccactcatgaggatgtcaaagttgaagagaataagttgattctagaggtgacctgttttcatttttatggagtttaatcaagagtgaattctataaaagtgaagctaccatacaaacaactttcactccccacatatttcatatatgattgagaccataagcttgtttacctcaacaaataccagctagaactcagaaagctaaagatttaggagctcagtttgcatcgaagggtttatattaaatttcaccttgtcgctacataaagcaatccttagagctgtaagtttccctaagtggtatctagggtaatgattcacctttggcagagcactcaccttttgttctcaagcagtcaacatcatcaggcctatgtaaaataacatcaatcaacacaaagttctggaacgcatcaagtgaactcagatgacagcccaggaagcttggttagtcctaagagaggacagcatggctcttcatggatggccagctgctgctcagtctatacccttccccaaaatgtgtaaatgtgacttctccatcttctagtcactggctttccccattccaggacacaggaggactcaatcaatattccataaggttattttgtaattcattaatcaagctattcaattaatatttgctgagcagttcctacatgctaggcgctgaggaatatgccaggcatacaaaagtgaaaaatacacgtgtggcccctgttctcatggagcttacagtcttgcagaagaagatagctattaatcaaaatgtcaggagcaaacataaaatagcactgtagtgtgtcctgtgaggaagagtttcaaggtgctttgagaacagataatagagcgatataaatgagaggttgggagaggtttcccagaatgaggtgagatccgagggcacagtgagaccaggaaataaccacgatgtgagaagaggggagggcaactgagaagtccaaaagtaggccagggtctctggggagggagatgaggctggatgggcagatggggctaggccacttgtcaaggagttttgtctttaccctcagggaaatgagaagtcactgaatggaatgccactgactattttcaagtatggcagcagtgagggtaacacagtcagatttgagttctgaaatctctctctgatatggtgtggatgggttgggggaagttaacacagatgtcagaaaaacaagatgctgctgcaataggctatgcgggagttgaaggaaccattattaaaacaacagtctcacaaaatgagaacccacagtttgtaaggcgttccataattctgattcttcagtatgtacttcctctaacagtgacaagcaacatttccttatttcaatgtttctcagagagtgggccatcagccaccagcatcagagttgacaggggctgggggaggagaagaagtacggcttgtttaaaacgcagattcctcggtgcactctggccctagtgactcacaatacctgggagtggggacaggaatctttcattttagagaacactacaggtaattctaatccaagactaagtgcgtctggacaaacacacttgagcatagaacataaatcacttttactttagataagcttttgaggttgcacatttgatttaatttctattattaacaagtaaaatgaacagataattaatcatccaaagcaacattccctggagagtaagagtgggtgtggccattaatagtatactggaacagtaggtgtaaccaaacaagctgatacacatttacctatagcttgctaaccctacttcagtaatagatgtcctatgcaaactactctaccttcaagtgatgagagacccctcaaaatttatatttgagttctgagactctggggctcactatcttatgattgttccttttcatagaagcagatggtattaacagcctgtaactactttcagtggcttctagagcaaagggcattgaggctccaagagacaggttctatgtttgcaacaatgaagggaaacatgtctacaactctcttgcttagaaagccttagtaatttaggctgggcgcggtggctcacacctgtaatcccagcactttggaaggctgaggcaggtggatcatgaggttaagagattgagaccatcctggccaccatggtgaaacaccatctctactaaaaaaaatacaaaaattggccaggcatggtggctcacacctgtaatcccagcactttgggaggctgaggcgagtggatcatgaggtcaagagatcgagatcatcttggccaacatggtgaaaccccgtctctactaaaaaaaatacaaaaattagttgggtgtggtggcatgcacctgcagtcccagctactttggaggctgaggcaggagaatcacttggacccaggaagcagaggttgcagtgagccaatattacaccactacactccagcctagcaacacagtgagactccatctccaaaaaaaaaaaaaaagctttagtaatttaaaaacaatgcctgcttgccccttgttttaattaaataaagagagaaatctgcccatcagtgtcccaaatgaggtagaaaagtggcaacttgttgtcacaataggctcacaatttctctcctaagaaaaataagaagaaaagttggaacattttcatcccaactccaatactcagttccactgggtggatataattgcctagttttgtgtacaaaggcttaacctcaacacggtggcccttctgccttctacaccgtcactggggagtgactctaggtctgtctgagtctaggactgtgaagataactaaagaatcccaaattatggcagaggggataggcagtatatatcacactcggacacaccttggtatttcatttgacagtcaaccttcttgcggatcatcaagcaccgtctcactaggatctaaaagtctattcttctccagggtagagacatctagccccattttcagtaagccttagaacaagtagaagaaagaaatctgcattccctcctagctctgccactagccagctgtgtaattttagttatcacataaattctctgtccctcaatttcttcatccataaaataaaatgcacaaacatagactcactcaaaggtctcttctcactttaaatttatacaactttgatcatctgtaaaaactcaaccttgagaaataaatacttaaaacactgctgaagttcaggggtttttaatacataatttcattaagattagacctgcctagaagattccctgcataataaaactttcgtgcttcttttccagaagtgtatttctatcttcccatttcctcaccttcttggaaaaaaaaaaacacaaaaaaacaaaaaagaaaaccttctctttttgctgtgtacttttcttgggccctaaggttaaagctacctgtaagaaacaaaaggccagtgagagtttagtgaaagatactcctaacactttccaaaaatcatgcctaatataagccctttctaatggcatttgcttatgggaaaatagtcccaagtagctcttggttgcaaggccttaaaaaaataaagacaattcactcatctatttttattattactaactctggtggtggacacaaagcatccatgtagtaacactgcacctatcctgacggtaataacagctaccctctgtttccaactcactcattattttctgatggggactatccttaaatcttagcactgtagggggaaaaactctaaagtacttagttttttaacttgatggcaaaatgaaattacagggatatgaagaaacatccaactttaggaactagtcatttgtagaagttaaaacagaacttgttcattttgaaaatgtaaccatgtgtcaaatccacctactaattcatagcaacaatataaaaagctataatttaggactgttcacatgaggcagagatcagggtggtgttaaaatgaaatatgctctttccagaacacaaaagacataataaataacgattcatatttgtataacatctcagggttaaaccaagtgagttcagacatacaattttacatatggcaagggcgatatagggcaaatattctggactccctttacagacaaggaaacagcctctaatgggttgttaggtgacccgtttaatagtaagtggcagagccagaatttaaatacagttccgattttggacgtcatgctctttccacagactcggtgacctcttttggactttgacatgcatgtacagatctatccctaacggtagtaattctatctgagaatctgtgatctttagccaagcgtgaaccatgctactggcagcgtttctcccaaggctcccaggccattcctctacggagttggtgtttgtatcagaaatgtcagatctggcctcaggtgactactagcagaatagttttaacaaaccaccaccacttccatagttaatgatgacacaattagttcaaaacataaacacataccataataggagctaaatggaaatgcagagaggccagccgtctggctgacagctgctccagcgtgccctggttgtttcagcttctgtgatttatttactcatttgttttctggtggtgaggagggtgtgcaaaatatattgtcactttagatagcacttcagcaaataccataacaacattcccagggattgctagcagcttttgttcagcacaagcatactaaattttaaagagggaaaaatagcgtcagataaatcacaggattttaaaagaacatcccaatttgttcacagtttaacagtactactgtcaggcaaaacatataaaactcttctttttcatctctggatttgacttacaaagagaactaagcacatggtaaaatccccaagattaaatgtgtatgatggataagagaacaaagtgttttctttatgtctgtaatatgaacccacgaccactgacatatcaatccacatctcctccacattactcttcactcaaaaccctcctcaacattgccgattgtcttccatattgaacagatcctgtggagttacactaataaattttcagatgatgcttttattgcctgctccatctatcggcaacacttatttccctaaaaaaatagcctcaattctaaaaccactttacataaagggaaactctactgtggaatagaatggtgtgaaaagttcccctagaatttcattaaaggtatgctccaggtggctggacatctaagaaaactaataacagaaattatgtccttgtagcccacgggtagttgtttgagtataagctgggcagatagaaaccaaaaacagaaagtaagaatgccatgtagatagggaatttcagtgggtaatagttaaacttacatgcttaagagtcagagaaaaaaaaaaaaacctcataacttaaggttgaaatttgcaattcaaattcaatccccctttatcctgttttctaaaggaattcacagggtagggaagctgagctcatggacttagcaagggccatcccagaaggaactgacaaccccgtcactgagttgtaaatggtaggtgggtggctagagtattgctgtctattgtactcacttacagcagccatgtgtctgagattccctggcagaattttaatcaaaataaatttaagccaatataaaattttctacccattttgtcacaaatggatgaacctggaggacattatgttaagtgaaataagccaggtacagaaagacaaatatcacatgatctcaactacctatggaatctaaagaagatgaactcagaatcagagagtagactagcacttagtaagggtttgggtggaagcagcggttgaggagatactggtcaagggatacaaaatttcattcagataggagaccagatgcagtagctcacatctgtaatcccagcactttgggaggccaaggcgggtggatcatgaggtcaggagttcaagaccagcttggccaacatggtgaaaccccatctctactgaaaatacagaaaattagccgggcatggtggcacacacctgtaatcccagctactcgggaggctgaagcaggagaattgcttgaacctgggagtcggaggttgcagtgagctgagatggcgccactgcactccagcctgggtgacagagcgagactccatctcaaaaaaaaaaaaaaaaaaaagaagaagaaagagtaagtatacttaacaatgtatacttgaaaattgccaaaggcatagattttaagtgttctcaccacaagaaatgataagtatgtgaggtaatgcatatgttaattagcttgatctagccattcacaatgtgtgtataattaaagcatcatgttatatataatatatatacaattttattttttcaagtaaaaattctaaaacaaaataaaaaaaattctatctctgttctctagatgaccgaggtgctcaaatttttgtttcagaaaacacggtcaatatcatatcatttttgtgtgtgtgtggcaattgctggcaaataaatagttatatatcttctaagcttattaaaatgaactgattaaaaagcaactgcttctataaagaaagaattctttcagtgtttaaatgaaataacaatgataataataatacatagctcctatggagaagggaacttctcagtccaagttcagtaagtagatactgtatgcaattcaacaggtcacaattataatgtaagactctcaggggcaggaataatgttttctatatcacatccctatcaccacacactgcacaacacagaaggcattcagcaaatgtccaatgctggtgaatatgctgatgctttacctctgatgacactgggagtgagagtactgctgaactacttaactattcttaagtactttcaacagaaaacattttttaaacaagtattttggcaccatagacataaagcaaaaaaccaataggatatttgcacagaagataaaagcaccactaaattgattttctctcttagaaaatgagattttgcacgcttatcctttaactgacaccccctgccacatgcatcttctcacataggagcaaatcaacttttaagccataaatagttgtcttccctaagacaccctgggaatttctggtgactcaaagactaactcccaatcaaggtactctattcctcccaccttcttccaaccaggggttacctaaaagaagagctcgaataagatgcattaactatactacttttgaaagtcagacataaattacatagttaattctcttgggagctcatgtcagaaaagagagaagctccacctatttgcacctaaatggaacttaaggataaagcaagaagactacacttcttctagtacctgctgtctctagtcaggcaaaactcagtgcatagggtagggctgaattgcttgaggatttgtactgaagacatttttgctagtaatactgtcctggtatacttttcgacattaaaactattatttttatccctaacccctcaaagtggcaggaagctatcacttgaggtgcttctttgtcacatagtgggatgtacattctgacaaaccactcacagcctcagtgggagtagagaagcaaagagctacttggcgaagacagctgtaatcctgccagatgattcatcttggtgagagaggaaaggaaatttagacaaattaacaggaaataagtatgatcctcaaaggcaattagaaaagtcagaatatgtatgtgaaaaagcaacagaaaagtgcatccaaaacctgggtaaccagtttcttcatgcaaaatctctgtgtttaaagaataataaactggccaagctgtggttcccatgacaaatggctctcccggaaaagctcttccaaattaatccaaataaatagtcttctagatttcaccagtagccatcttagtgttaggcaaccaagtacatcttctgttgccacaatcatagggaggggaaagtagaaaactgagcatccactgagctggatgctggttccaggtctgccactcgtaggtggtatgactttggtaaagctactgggacatctgtgacatcatttcctcataggcaaaatgaggtggttggatgctggaggtaatatttagctctgagagtcagtgacttcaaattacctgtcttgtcttctattcctcctcctgagcacctaagacttgctgaccatcctgatcaccccacatggtgactgacccgcctgtgtcacactacagctctttccttagaaaccagacagaagctggccacatggtgcacatcaacatgacaatagtcgggaaacatggcctgtggtcttggctacacgaataaatgtgagattatccaacctctctgaagcggtcctcgtctctaagatcctggatgatcactttatagacttctgcccacaacaaccctgaagcattctggcaataactcccactaagctgtaaggatgctgcctggttctccgtgtctctttcaacccagcaaacttagcagtcctgtgtgtcaaagattatgccagacactgatgggagagtcagaagcaattatggtttgggccactctagaaactcagctctacacgtaaggctttgaacttgtggggctgagaagggttcactgtgagaatcagccctgcggcctcgctgcccacatcctctctgccaagcttccactgaatttccagggcctgtcatcatgtcaagaaaaaagtctcagtttcgtaactctctaacacttgctaattgttcaacttttaataaaggaaaataggcctcaagctcagttagcaggcaccactaactaaggcgaatttagagtcctgtcttttttttcatttaggccataatgtcctcccactaatgcagatgaaatgattttctatttctaggaaggtttttccagcagcagggttttcctccacactctgcttcttcagacacctctgctatttctcacccacccagtccagtctagggtgtctgaacagggcccaccccatgccctagtcacttttctgagtgacccactgaccttgctgccccatgcctacttcctccccagcaacgagcttcctaccaacccatgcttcaaacatttctgggaactcctcagagccccgagaggttaagtaattccccaaacatcaggccgcttgtgagtggctgctcagtgatgatctgaatctaggctgttggcctctgaaggctttaaacttatccaacattctctgcttcctctcaccagaatacccatagtcctctgctttcttgcatcacagtgcccataaccctctgctgtctctcatcagagaacccacagaccaaaggatactcccatttatctgaattttactccttcaaagaccaactcgactcccatcttctccagaagctttgcatgtctcctatgcagaatgcataggctggccactctacagtagaggctggtgttgggttagtgaaaatgagatcacagccatgagaccacagccacaggaagctttcacatagtgagcaagaaaaatcagccaagccttgcagtacaatgattttttttttctttttctttttctttttctttttttttttttttgagacagggtctctgtcgcccagactgtagtacagtggggccatcatggctcactccagcctggacctcccaggctcaggtgatactcccacctcagcctcccaggtagctgggactacaggcatgcaccactatacccagctaattttttatatttttttgtagagacggagtttcaccatgttgcccaggctggtctggaactcctggactcaactaatctgcctgcctcagcctcccaaattgctgggattacaggtgtgagccactgcacccagcccgcaatgattcttaacccaggcttcatattagaataggcctgcggaaatttaaaaaatcctcatgcccaggccacaccccagacccattaaatccttagggtggaaccagcacattagtgtttttttgttttgttttgtttttaactctccggatgattccaaggcacagccaaatttgagagtcactggtgtagaaagtaattaatgccatgcttgcaagatatgggacttggaatcaaaagatcaagtccactcccagcctgactcactgtatgacctgaaaaagtcaactgcctgtgtcaaacaggttcttcaccagagagatgaacttgcactttctgccctttctatttcaaaaggttaatgtgaggttcaaatgagatgatgctgcaagagtaccctgtaaactgtaaaacactttattattactgtgtcaattttcactaccagtcccccagtggtgatgttcaaaagctcagaagaaaaaaaaaggtaataaaaatgcacagaaaagaaaaatacaataacagtagggttagaataattaaatacagtgacccaagagaaatatagcctattttatatcttaagggtatgtttataaattatttttataagtacaataaaaaaggttgtagcaggaaaggaattgtattcaggtgaccacttatagcagaagcttattaatacagaacaagggataggcttggccttaatggggagaaatgagtttcctgtgctaatttattaatttaatgtggaacaaaatttattaggggctgaggtgggaaacctaccaaataaaacacagaaaaaagcacctgtacattttgtaataagaaggttgttagtgggaacttgagagctgtttgttacaaaacaatggaatcatcatgaatgagattcttggctcttcgtttaaacaaatgaagtgaaaatataagccatcataaaccccaattcaacaggcttgttcccaaagcccctttgaacctggtttgacacttggtgcatcccacagaaggcatgcagcaaatagccctgagacagcaggccaggccctcaacattgacttaagacataccagcctcaggtctggatcctgagaacatgagggaaggaggacagagaggatccacagtttctctctccttttgcatgcatgtggcatgtgacaagccctaaaatgagggttataatttgtaatttgcatttacttgcttttttcctcacttctgtatccctatgctaattcctaacagctctttcccccggttcacccagggaaccattaggaattagtctattgaataagtctaaggtttcacccagacttattcaatcactgtagaggattacaagctcctaaatcactttagggaaattattttcctgtctccttccccttcgaatactatgtcctaaattcccgttttctgagatgggttgatacagcaaaccctcagattaactggttcaaactaatatgtgaatgatgctctctgaagtatctgtcatcttaatttcttttgctttggaatgatgctttatggaggagatttcagaaaaacatatctaagtgaaaaatactggtagctggagtatggaaacaacagattgtgcagtggaagaagacagcaccaaaacagcgtctcctgcctaggaatctgaccctgggtttggcactcctgaggtgtctacatttctcacagcttcatgattttctccaatgctaaagctttaggcttacgaaaggcatccgtggcactggccatagaagtacagtaaggtgaggcaggaagaatttggctatgtgaaggggaagaacagttaagtagatgggggattagctgtataataatgataatatctactgtttattgaatacttaaaatgtgctatgcacgctatcatacattatctctgattgttaaatgaaattatgtctaaggaaccactgggaaaacagaaatctttccctttagcctcactatacccactacatagaagaggaaagtgcaattccagctaattaggttgccccaaatgacaaaaccaactgagggagaaagctaggattcatttccaggtctgcctctccctgaaactttttctcatttaaattcctcttcacaaattccccaaccagcacctcttatacatgtggtctttaagatgtgagggactgctgggacttcatagcagtcttttaaaaaaatataatttcagcttttattttagatccaggggatacatgtgcagatttattacctagatatattgcgtgatgctcaggttaggggtatgactgatcccatcacctaggtagcaagcatagtacactatagcttttcaacccttgccccctccctccctttcccctatgggagtccccagtatcttttgttgccacatctatgtccacaattagccattgtttagctccttcttataagtgacaacatgtggtattttgttttctgctcctgtgttacaggataatgtaggataatggcttccaactgcatccatgttgctgcaaggaacatgatttctttcttttttatggctgggtagtattctgtggtgtatatatacaacattttctttatccagaccaccactgatagggacctaggttgactccatgtcttttcatgagatgtctttccaattgtttgtgtcatctctgatttctttcggcagtgttttgtagttttctttgtggagatcttctacctccttggttaggtgtattcctaggtattttatggccattgtaaatggaattgcattcttgatttgcctctcagcttgactgttactgatgtatagaaatgctactgatttttgtacattgatttcatatcctgaaattttactgaagtcatttatgagttccaggagtcttttggcagagtgcttagtgtttcctaggtacagaagcatataatcagtgaagagagatagtttgatgacttcttttcctgtttggataccttttatttctttatcttgcctaattgctctggcaaggacttccagaactatgttgaatagaagtagtgagagagggcatctgtttcttgttccagttctcagagggatgcttccagtttttgccctttcagtgagatgttggctatgggtctgtcatagatggctcttattatgttgaggtatgttccttcaatgcctagtttattcagggtttttgttttaatcatgagggatattattgaaagcttttcctgcatctattgagatactcatttaaaaaatggtctacaatttccctttcatcagattatttcttccctatgttaatctagctattgcatggagaaaagaagaaatactgagtattgtttgcctctgtgtttgaatggatggctgacagactgacatgggagtcgggaggaggggggcaacttcaatagacttctctactatctccaccctttcagggcctaggagctgacaaagtcctgtgcagggggcacctctggatagtttcacagctggcacatgcctaaagtgatttaggattagatagcccttcccctcccaggccacagcaaataattattagtggaagaagaaacaccctttgaacttccattgagcatccacattctcccatgacctgtaagtcaaacttccttaagaatattctatggaaaactaagcatggtggctcacacctggaatcccagtgacgttggaggctgaggcagcaggactgcttcagcccaagagttcgagaccagccagagcaacatagtgagactctctctctctctaacaaaagaatcttctccctgtgcccttcctcatagagttgagctgtccagaaaagatcttcaagatcatggagttgactgatactcacaatcatagcaatggtatttgcatcacctggggaaaatgtttaaccatactaaggcccagtctcagctgccggagactctatggaactgttctgggttgaggcccaggtgggttgtgaaccccaatccatcacagcccaatcccttgtcttacaaccgaaagctgtaaaggggaagatggccacctttctagacccagaaactgctccagagggcccaggaacaagcttctaagccacaaaggttgtggttctgcctcctcagatatgcctgtcaggccaattaacacctgaatcttgcaatggcttaaatgccaacagcagacccctggccagaccattttcctttcaccccacacctggcaatttctcttcatcgccatgctgtgctcgccgtgcagacaaaatcaataaggacaatatagctaaaaggttaccatatagcagagatctcagtaatgaaagtgtatgtttttttccagcaggcctgttccacttctttcttaactatttcctcattccaaaactatatttcctgtcacagcctattttctctccatttcacaaagcattaataagccaagttctaaaaaaacaaaagacagttttttagccacaagtgaataaaagtaaggtcaaagttcaaggactgatatcatcgtgattttgctctgttcaaattcatttgtttcttagaccaggaaataactgatatacctggttaatgatctagaatgccccaagtatttgctcaagctgcacacttactaaagggcaacatcttttggatggtagccacagaacctcctgacctgaaacaatattgggtattcaaaataaaggctggctctctgctgagatgagctggggaaacagcgggtacatacattggcaataaccagctcacctgtagtaagagaaggtgcttttccagggcaccattttattcacaggttatatttgttttaacagagagaccatattctgcttttacttggttaagaactcggttcagggtcaaaacgtctaataggaaaagcattcgtgtctgagcacagaatttaggtagaaattgagaacaagaaagtagagtcagaacccattaaaccagggattttaaattccggagaagaatgtacatatctatttcaactcttagtgatgttatttaaaactcttctattcctttcaaagtatttaacatgactttggatgtacgagacaaatactttttagttagtgtgccagccagcaggtgctctcaaatgaaactgttttgaaaacttctggatatctgggaaatatttctgtaggatgtagaataaaaaaattcaccttatagaataatttcaaagagaaaaggaagattcatcttgtttgaaagacattatttttgactgacctgaatctaagcacacactttggttatgagaaattccgccttctgtatctgaacttgttatatgaacagtggatgccacttaaaacaaaagaggaagaaagaaatctgcttcctcaaggaagagtttcagccctttaaatcttaacacacaataaaaatactcccattaccaccatcacccacttcagcagctattcgaagttcataacaattcatagaaaagaacaattgcttaaagcagaatcaaaaacccttgagacttctcaagattataggccacagacataaataaaagctctcaataaaaatactttataaccttattgtgtattaaaatgttataaataactgtgcaaagacttagccactctatcaacaaacagaattttagatttcttttcccagcctgtgtgcactcagtcactcaatgtactcactgccgatctacatatttacagttgtttaccacattttgttaaggcttaaaaaaaaaataaggaaagagaaaggaagcactttctaaagaactgtaaattacaattgagctctcttaagagttcacttatcttcgctgattaacttccagggtacttactgaaacaggtgttgtgtgtataaaaatcagtatagatgaatatagcatgtgctggagtgagactttgggctgtgaacttcacttcaactctattttaaccttttcaaaatgagggaaaaggttatggtgaaatgaataggtgttgatgtacctcactggttcctagcacagatctacggacaagaggaatcaaaatgatctgtcaaacctggaaacaacaaaaccaagcagagtaccagcccgcatcacttgaactcagtagatttaaggagatgcccatacagcagattctgttgcaagtccctcaggtgattctgatactcagtcagggctgagatgaactagtcaggaactttccagttcttgaaaaccacaaacacttcaattttgccttgtgtgtacatatgttcatgaaaataaaatctattatgttagaaatttggcaaatatacattttatactaaagatattgctatttaaaggagatttcttttaaaaaagatatcttttataattgatagtttaacaatataatttttcaaccctaacttttctctccagtgtatttaaattttggagtttgcttaaagtatacttaaatcattacaaggaaagaaggaagttgtatggcagacaaacctgacagcaataacttaagcataccctgagaatgaccctagggtgtaagaggaatgtgtgtttggagttccaaacttatgaatccaggagtggacaatccagggattcattccttatcaatgaggaacatcagaacccaggacccatcctatggaacacaggctggacaggtgatcgaggccctctgttttgggttagatgaaagttgccaggtggaggttgctaggcggagggtgctaagtgaaaatgctatataaactgcatgctttttgccagcagttgtggttctcctgtccagcctgcagccactagaccaccctgtatgtaagttccctcaataaatcctgtgtgtcctccactggctctgggtgtcttctttgtcttctcgaacatggtgctgtccctactgaagttaataggggtctggcacaacaaaggtaaagttcaaagtcaaaaatttcctgccacctctgttaagaattatagtctgtggaataatatctctgccaggcaagtcttgggcttcagtcaggaaggtctcaggccatgtcatgtgctttccacataccataaaaggaactggatatatatttcatgattgataaacttagggataactggaaaagggtctctttccccatgcttaattacatctaagagtatgtttaaagaattatttaaggaaaaagtaattatgatgttcagttagatcactttaaatggaaataacttggaaacatactacattgctctagatgcagactaagggatcaatgactgaaaaaaaagaacatctttggaaagaatagagctgggcccagaaaacacaacagctcagggctctttaagaaggtgggataaagaggtagagagaaccaaaaacttggacatcactgaaattttgctgatcactatacttaacctctctatgctctccactggggcaatgactcaccaagcactccatttttatggcagtctacccagctaattaaaagggtgcaaaggatgtcgagtgacctaacattggtaatgtgtaactttgggccaactatttaatttctctgtgcctcagtttcctcttctgtaaaataggtgaaattacagtaactctttcaaagcgttttatgaaaattcagtgagttcatacctgtagaatgatcagcagcatagtgactggtacactgcaggtgctcagtaagtgttagatagtattaattaggtcagataagtggtctatgctatacctcatgtagtccaggccttatagcattgggaagagtagtgccaaaatcccagcattctaagagcaagaggaaacccttgaagttattgttctgttctaagggtttcacttggtttagcacatgtttcaatcattctacatacgtaatcccagcactttgggaggctgaggtgggcagatcacgaggtcaggagatcgagaccatcatggccaacacggtaaaacctgtctctacttaaatataaaaaattaaccaagcgtggtggcacacgactgtaggcccagctacttgggaggctgaggcaggggaattgtttgaacccaggaggcggaggttgcagtgagccaagatggtgccactgcactacagtgtggctacagagcaagactttgcctcaaaaaaaaaaaaaaaaaaaaaaagccatcacttacagactaagagatttcccataaaacttgaaattgtatcttcttgaaacatgtggcgatctttctgcactggtgtgtttctgggttgtctgaatctgctgccactgagctgtggctgcttcccttagggcagacagaggctctccagcctgccataggccccaccagtccctcctgtttctctggcattaaatcaggtgtgggttgttatggcatggctttcaaaagcaaggcttttgcctagtaataaaaaacaaatgacaaaagtgctctgtatttatttctttatcaaaagtgaaaaaaaggaatgtaatcccctagagggtacttgatttttctcatatctggcctactttagctatttacattaattggtgactctaaattcccttcttttaaaatatgaaaaacaaagaacccagagactttaagtgaccatctgaggccataagtcttggtagtcgcagaagctgtatccatagttgggtccttttccccccagttaccatttccacttgtccattcaccttctttctaaatgagttagctaatgtgattcaattcatattccatacagaaaagtaggaacaagaggaagcatggcggctacaatgaagaagtgcagaaggtagctatggacatacgagccctgtaaagggggtaaccctttgttagttctgtgattatttgcatcttactcaggctgtccgtgtttaaatattttggcagatgaatgtgatggaatgatgcccctctccaatgggttgctctattttctttatgcttaattgccccctttcatgtctaattgtaatttttttctaacataagttccctaatttacttaattaaatgaaatggtggtgtgagtgacacaaatatgaaacataacacatatgaaatcctaaaacacctagagagaatgagctggaaagacaaagcagtggggacccgggaggtgcttttccttccttgagctccctaaagttaatcttttcaggtcttcccttctccctaatgaaatgagtctatcctaggggcatatgtcaccttccctgcacatatgacaatatttctgtgactcatatgcttgtcacttcctcagggggaatgagaatcgaacattttatagcttgttaatatatctcagtttactttattattggatttttaaaatattgagacagtgactttgtgacctgagattttagactgtgcctactttccaccacaccatcaaaatattccacagataactgctcagtttaacttcatatggaaaatctgtgattaatttatagttctaccacttggcatttgcgagttcatcctcaaaagatacccacatcccagtccctgaagatttgagacctctacgagctttgccataaaatgagcctgaaaatatctcctttagtggctattggaagaaagaaataagatccacgttgtgtaagtgctttgcaaactgtaaagcaccaagcattgagttccatgttccataagtgctttgcaaactgtaaagcaccaagcatatgtgccctgacaatgagacatggtcccagaacactgggaacacaagatgctctgagaaaggcaggccgtggaactcatgaggaagctcatgactctcatgtccatttcaagagacaaaagagactaaaagagaagtggattattaaaaataagcctgagttaggaagcagagtctccaaggagaacagtgggtttcatgacacattcctttgtgccctcagaatgtgtggaagcttatattttggcttctattacgttgttgaatatatatgattatctacctgccttccccactcccgagcatcctataaactgagcatttcaggaaaagacctgtgtcaggcatctttgcatctctggtacttagaccaatatcttctgggtacttccagcctgttaagttaacatgtgctgcttagtgtgacagaataatacctatcctcaaaacatgttcacttcccagtccctcaaatctgagagcacatgttaccttattttgcaaaagggacttttgcagatttgatcaacttcaggatctcaagatgaggaaattatcctgaattatccagttgggctccatatcatcacagggtccttataagagggaccctagagaggacaatgagatgtgatgatgaaataagaggttggagagatagactggaaagatagaggcaagggccacaagctaaggaatgctagattctggaaaaagcaaagaagcaattttccctggaggcccccagaaagaatgcagcctgaccaatactgttattttggacttttgactttcagaattataagagaatgaattgtgttaagccaccaagtttgttacagcagcaacaggaaactaatacacttagataagaaagtacatgaaaaactggcatttgaatgaatgaatgagcaaatgaacagaggaattaatggaaagagctctagatagaaagcggaaaggcccaggttcagatctcagcatagataataagcagacctatcatttaacttggggcctatagtgtaatctctctggaagtcctcagcataagagctaatgctgtggaatcagactgaccagggttcaaaactcttctaggctacttcttgattgtacatcctcaggcaagcacttgcctctctgagcctatgtccacatctgtaagacagggatagtgccagcacctcctgcacaaaattgttgtggagactgaatgagctacagtctagtcacatttgatggggctctgaactaggtaaatttgaaactgtggtcacatgaaaatgttattaatgtcacttcatgcacaaaacttgaaatcatgcaaattccccaattaaaaaaaggtcaggaatggcaaagctggtaaattgtaaacctctgattaccacatagtgggaccgtctcagttgctgaacagaaaacacccattgtcctttgagagaatccatgttgaattatgcaagctataaattacacaagcaacaaattatgaaaggcctttgggaacacaccccctgaacaaaatatgactacctttaatgcatgcaaagcaattagcaggggcctggaacacagaaagctattactctgctattattatattagctcaatgataaaagactcagaacaaacactgctaccgcagtggaaaatgaaagtaactccagctttcccaggggcctaagctttacgtgggcctctggctcctttcagagaaatcttgcaagttggaaaatctgagacaggtgtgctaatgacaccccatattatgaagcaataaatttcccagctcttgcctgaaacgcagaatttggccgcagggaggtgttaactatgtgctccactagtatcaccacgcatacatcatgcataaactattttgccgctattagccttatttagaaaaatagaatttgtgagatgaaggggatctccctgggacttggcgccacccagcatcacctgcccttctctcttttctcgtttcttgaatgcccagggcacaaggctgtccctagtgcatatgagaagttcagtaagtgtttgttaaatgcacagtgacctttacagttcatgtaacccacctccctttcccattttacagataaggagcctgaggccaattaaaggaatgactgaaatatccctatcatgtgacattaattcaagttaatgactgtcttctccctacagggaagagttcatttcccaaaacgaatagactgggttatggagaggtaatagttttaaaacacgtttcttaaagcatatctgtttttctaagcagctttccgtttcgcaaaatgaatgctgctgatgatgttaagtgtctacaccacagatgtggctaataattgtttaagagctcagaagagaataagcaaaagaaaatatgaatctgaatgaaagagatccaccatgaagaaatcagatgtagcctaagaatgatgcctgattatttagttttaatgaagccaggtgttacatgtgatggggaacaaataatttacttcacagattcatatgaccctttcaggctgcatcgaaccattcaatgcagaatcgagtcgcattttttacttacacctcaactttgtaccaaagcagttataatatctatgaagaattcagagctaggaggactaaaattttttccctttctttaggtggccacatatcaggaaacgctgagcatgcattccctttgtcaagaccaccctctcaagaagaatctaagccctttccctagaaattgatcttagtgatttttccactgtctctatgaagctaactttaatttcttctgaggtagcttaagtcaactctttgcattatattcactgcacatgggaaagaattcttactaccttcttgaagtagccctgtgtagatttcaagggtcaacaatttaggatacagcctcgcctcttaaggttaactgtggccagatttcttaacttactttgatacttttacttgtattaacatattcctcccaatcccttttcacaaccagttgggttgcagagcccacaaattcaggtaagctaatgccacattatgctaatcagctgggttcctatgcttgctttctcaaacccactggctttttagccagcaaaaacctagggctgcccagtgatgacctcacatttccaccaatgtccttgctttttaaagcttttcatacatagttgtgcagtggatgctgggtctctatttgtgatttgaagtgattttcagtagaagtcctaaatttatctatatacagtgtctgtgctgtttctattgtatttcccttttccaccataccacagccttctcatctgtacaggcaatctggaccatactcagattagatgtcctgcttcctggcctggcagctttgctggtgttaaaggacagtgggataagggctatcagaagaagacaaagacctgttatttcactgactgcttactctctttggacctctttagactccttgttgcctgagatgcaaggccagacccaggaggactgcatacaccccagaccccatccagctcttccctgtactctcagtctcactgtaactttttatttccaggacattacttaattatctggagatgcttattctccacaagcctgctgtgaagattcacaccactgcactttacctaggtgtcccttctacctggaatgcccttcatggagttctctattccacaggcccaccttaaatgtcacacctctggcaagtatttattcctcacctcctcagccaagatgaggcattctctctcctgtgctcccagagaatgttgtacacacctctcttttagtcctggccacagagtactgcaatgcctatacaagtctctctcattcaccacaaacttattttttgcatcttctagaatcaaatctacactctgtttcacagtaggagtttatgaaatgaatgaattgaataaacgtgtatgattcctcaaaacagaggtgactaggtggcttttagcactggggtctggaacacaccttttatttatctctgggttagagaggacaaacctagagaaatacaagaaaaacaagcagaccagtacccagccaagaataataaacatggtgtacctgatagaccattatattaacagtttcttcttttttctgctctggagatccttgactctgcaatagatttcgtactgtttcttccatcctgagaaacaaaaatattaagaatttcttaaagaaggtttctaattaacacggatccactcgagttgtagaaatcactcttctatgcgtatttcccaagcttcaacctggaaatctcttttctctctacttcatcttctatcagttatctgtcatgaagtcctttgcaaccattctttgggatgcctctacattctctttctctaccattcaggtctgcctctttatacttggacatctaaactcatgcacctatctcccaatatccctcttcatttccaatcacttctttttaatttgatacagtatcactacatcaatcttcccaaaaaaccactttcatttttaaacaccaattttcaaagttaacacatattataggaatgcactcttcccattaatctactgtcaggtctttctgtgatggtctttctatgacagcacgtaaagatttacttcattcttctcaactacagtcatgcattgcttcataacaggaatacgttctgagaaatgttgaaatgcatcattaggtgattttgtcattttgcaaacagcatagagtgtacttatataaacccagatgggatagcctactacacaactaggctatattgtattacctattgctcctaggctacaaacctgtataacatgttaatgtcctgagcactgtagaaaaattataaaacaataatatttgtgtatctaaacatacctaaatgtagaaaaggtacaggaaaaataccatataaaagacttaaaatggtgcacctgtataggccacttgccacgaatggagctcacaggactggaagttgctctgggtgagtcagtgagtgaggagtgagtgaatgtgaaggccaggacactactgtacactgtgaacactgtacactctaaacactgcaaacttacactgcactaaatctataaaaaatatttttctttcttcaataataaaccttagcttactataatttttactttataaacttttaaatttttaaaaaactcgatgcttgtaatgacatttatcttaaaacataaacatgtataagttatataaaatattttctgtatgtccttagtatataagtttttaaaaattgttttaaaaaacattttttggctgggcacggtggctcatacctgtgatctcagcactttgggaggctgaggtgggtgggtcacctgaggtcaggagtttgaaactagcctgaccaatatggtgaaaccccatctccactaaaaatacaaaaattagctgggtgtggtggcaaactcttgtaatcccagctactcgggaggctgagacaggagaatcgcttgaacctggaaggcagaggttgcagtgagccaggatcacaccaccgcactccagcctgggcgacagagactctatctgaaaacaaacaaacaaacaaacaaacaaacaaacaaaaaacatttttgtctgggcacggtgggtcacccctataatcccaacattttgggaggctgacgtgagtggatcacctgaggtcatgagttcaagagcagcctggccaacataatgaaaacccatctttactaaaaatacaaaaattagccgggtgtggtggcaggtgcctgtaatccagctactccggaggctgaggcacaagaatcgtttgaacccgggaggcagaggttgcagtgagctgagatcgtgccactgcactccagcctgggcaacaagaacaaaactctgtctcaaaaaaaaaattttttttacattattttattaaaaactaaggcacaaacaaacacattagactaggcctacgcagggtcaggatcatcaggatgtcaccggccaacaggaatttttcagctccattatagttttaagacaccacagttttgcatccagtccacagttgaccaaatatcattatgtggcacatgaatgtgcttcctagtatgtcatgttgagaatgtaagttacttaagattcccctacttatgaaatttaaattacttcaaaatttttgttattccaaacaatcaacatctttacacatacctctttatacacatgtgtatttctacaaattatatactacatgttataatcttgttttgttttaaatgtatacctccagtgattccccattagctcaaagtaaagagtaaaggaaacacacccattcccatttccagacatttgcttatgctggtgatacttcttagaatgccccctccatttcatcttcctatatttcaaccctcttttcaaatttaccttaagtttcacttcctaagataactcctcattgatctcctgcttctttgaattcttatagccctatacttcaaaccatttactctatcacttaaaaatccttcactttaatgctcaaatattttgtatatgcaggtcttatcttctggaataaatgacaacatttggtataggactatgccatatatttctaatgtatctctctcaactgtagataaaatacatactcactagacattattgtatgaatcctttgctaattcattttttaaagtgtgaagtagttactctatgccagacactcatcctgtatgttcagactgtgtctggatgaccttgtcattggggcccaccatgaagattcatagacccaaactctgggagcaagaagcctgaactcaatgccctgaacacgatgctctctgtccagaacctgaactggttatcttttccaggcccatcttgaagcatgtatttgagtgactcagtatgacactggttgaagagaactgtgaagaaaagcaggctgatccagcttctccctcttactaagggcttctcgtatgacaaattaagggctctaggagaccagtgaatccgctgatgtaggaagcccattgcagtaggcaggataagacagttcaaaatgccacctttctaatatggcacgtaactactcagcagcagagtgaggaaactgcagacaactgggacaggccagacctagattattaattggagaaattctgcctttacagaggatggcacaaggactcatttgggttttcaggaagatggtgggcgctggttacgagtactctaaaaatgatttgtgaccacacatttatacaagccacctctgcatgtatccagctgagaaagcagaagctgttccctatattttcacaaatcttatgttattaataataactcaatctaatagtacttttaacttgacaaagaactgtctcatctgttcatcattataatttacttttaaaaaatcattctatctatttggtagatgagaaacctaaggtacagaaaggttagatggtttgcttaagagatcatggttagttggatagggagtttggatgaaatcatttttactgactctaaatacagcagcctctttctacttgaccttattggtattcaggaaaatggttttaaatgagtaagagtcttaactcctaactaggagttaccttggagaacaactttggtggatgaacccaagaaggcaacaataccatttctgacctggggagagcatgagaaaaactaagcttatgtgaaaaaaaaaaatcggtgcaaagaagtcacaaattctgaaataataagtgatcagaacccattgctaatacttgatttcattttatataaacaagctcttgagtggtatcagattttccatcatgtttgccgaactatcataaacaaggaagtaatgacaatggtcctaagacttgcccaagatcactcagcttgttcctggcaggtaaaggcctggtatcctggttttctaaatattagtctactttcttcccaccttagcacagaagctggatgtcttcttttaatccttattgcattcatttttaaacatctgacttaaaagtggccaaatagttagaactcggttaaaatgaaatcatattattttttactaagttaaaacacaatcttgtctcaatgcatatcttgctaaattatctcttctgtaaaattacaagctataaacacaagttgctggatcaaaaagaaaaatatctattcacctttcccccatttttcttggctttatacttaaaaaataggaaaaagtgggggtggacaggaaattgttaaaacaatcttgagcagttcagaacccttagtaatatggtaaacactcttctggcactactttatgattaatcaaaaccaattacatttcccacccaagtcttggaacagagtcacagggccccatcctaacccttggtaaaaaatcaagttgtcctatctttttataacctctatgaatcatgtcacagagaaaatgttataaacctgataagaatatgccattatttactccctgatgacatctttttttaaaaattcttatttaacaaacttctctattttcccaaaaatcaaaaatcaaagactaaagcatcttccattgttgtttgacgcccaattacattttgcttcattttattatttcgacggctaatgaatgaaagtttgcattactagccagcacatagtacagttccaccatctgtctccccaatatgattaagaaataagccaattcctccctctccctctggttcaggcttgggcagagttttgtgtgttttgtttgtttgtttattaaatagctggttgcaatttatccttaaacactcaccttaattcatgtcttctagctctccatctccttcccccacctgaaactaagaccattttttcccctaaatattggtcaagtagctgccataactaaaaatatagaaaccaaaattatacttaatgagttgtaataaattctaacgtacatcaagtgaactatttttaaaaagttaactcctaggacagccagaggaaacaaactaaatacatatatgcaaacagtatgtctcaggtaacattaggtataaatgcaggcattttattttattaaaatagattccattttttaaggtacacactatgtaatcaataaattcttattacactgtttcctctgggagaagcaaaaaccttgcttaagaagggcactaagttaaaattagggaaattgcatattaaaactaatgcatgagaagagtaacaattcaaaagcaccaaagagcaggatcagtgagccattttaactaaattctctcccagttcccaggggaccacctttgtcattgacctccttttaaaatacggaccactggggtacttgtcactggatctgtttccagtgtctcaagagctggtccgtctagacaccaaaggaagatctttctgaaagaaaatgttaaaacacagtggttttctgaactctttcatggtaagacaacacttgataatatcaaaggccttctttgtaatcagagactatggattggactttgaagacctggacttattcaataatgaaagcagtgttggaaaatatggctccaagctacattagaagctgattattccaacatgtaaatgactgtgggctttttcacatgctttccctccaaccccaacccaaaatctagccctctgttttgattaatgacactctagggactgatccaattattacaccaaattgttctttttcacccctatattcagttatttagttgagactaacttcatttttgacagaaataaaaaagaacagaaaacaagaagccactcaagaagttattctccccaactcacactgataactgatagggttcattcaattgaaggctgaaccaaattaaattttgtttttagaaaatattttaacatgtttacttgctgattaatcaaatacctacttaataatgaaattaaccatgaaattattcaatattccttaatattcttttagtcaggtgagagggtgcaagaagtgcccgccacattccctttgattcccccatgccatgaagtttgtcaagagctgctgctgaaacttgcaaattgcttttctttgtgtttcattgtatttgactcccaaacttctcactttgagaaattgtgtcgatttaagaaagggtcccaccatgactgaacttcatttaatgacaggaagaaagaggctgcagttaaattagaaagaggcagggggaatggggtccttgaagcatccctcccttaccctaggcttccctcctaggaaacctgacacaacacagccccatgtagagaacaatgctcatcttctagagccaatggcaacaaagaggaccagcatacttcccatattggctggaaaagaaggaatacttgcaataaaatactagctccctcatattggatgcctatgtagtagggttaaatatcaacacatacttcactttggatgttcaagacaaacaaaattcatttatttgtatataaccaaactagtcgttgcttgaacctccacaatatgactagcattaattactgtccaaaaccctagtttaaatcctaaccctagtctcttatgatggatttctaaaatttttaaattttttaattttaaaaattcaaaacaggtgtccatcaacatacaactatcctatgcatttcctgcagtggaatatataccagcaatcaaaaggagtaactgatgtatgcagcaacattgaagaatctcacaaactatgctaagttaaagaagccacacacaaaagacaaaatactgtatgatttcatttatacaaagttctagtataggcaaaattagtctatggtggaaaatttaagaatagcaattgccttgggtggtggcagggattgactggtaaggatataaaggaacttcctgggataagagtaatgttctgtaactctatagggatttggactgcacaggttatatgcatttgttggaattcagccaatgttacatttaagatttatgtatttcattgtatgtaaattttatcaaaaaaagagaactgtaaacacatatggaactccagttattgatatatatgtacaccttgggaatatgcctttgacttactttttttttttttttttttgagacagggtctcactctgtcacccaggctggaaggttgcagtggtgcaatctcgactcactgcaacctttgcttcccaggctcaagtgattgtccagcctcagcctccagatagctggaactaaagacacgagccctcaatgcctggctaaattttgtatttttcggagagacagggttttgccatgtttcccagactggcctcgaactcctgagcttcatgcctcagcctcccaaagtgctgggattacagtagacttactttgaaatgcatcaaaaatatttcatttcaattatttaaaaatgcatacattgaggttccatgagaataaggaactcattcaagatgatactcccagtaatagtagagctggtattggaactgtttgactccaaacttgtaatctttttctactgtgccacatcagcattcactcaaatatttaaaccaccctggcatttacttggctgggtatcaacattttctgctatactgttatcacgtggtaacatctggattgatgggttctcgttacttgcaaatgctgcacagttaagccctccgtatctgtgagttctgcatctgtggatttgaccagttgtacactgaaaatattcaggaaaaaaaaactgcacaaagttccaaaaagcaaaccttgaatttgccatgcactgagtactacattgaatccacatgaatgaagtgtaggcgtcgtattaggtattaaaagtaatcttgagatgattcaaagtatacaggatgatgtgtgtagattatatgaaaatatggtattataccattttatataagaaagctgagcatccccagattctggtatctgacgaggggtcctggaatcgatcccccatggaaactgagggatgactgtttttgcattagtcaatcttttctcccaatcagatcaaaattcttctagatccaggctttatgcacagtgatacagtagtcttcttagccatgggggatatgttccaagatccccccagtgaatgcctaaaaccctggatactacaaagctctatgtatactttccttttcctgtacatgcatgtctatgataaagtttaatgtacaaattaggcacactaagaaatcaacaataacaactaataatcaaatagaataattatgacaacacactgtaataaaagttatgtaaatgtggtctctccctctctctcaaaatatcttattgtacggtcctcaccaatttttaactggttgaacttcaggtaactaaaactgtagaaagtgaaacctcagaaaaggggaaactattgtgcattataacaactgttatttacctgttgaagcatttaagaccagctattcatggaaatatatgtcctgcccactgggtactctcaattccaccgaaatgccacagaaaacacagagccaagccttgacccgtcccttgcctaaggaaaccctcccttcatgttttcttaacactctgagctctcctcctgaggtcactgactcctccttgttgtttatgctatccataggaactatgcaaagcttagttattgggtagatatttgataaattctttgtggagtgaatgattgaacctaatggattttttacccttgttcattccctgcatctttacattttcacttcccatagacctatgtatgcatgcgactagtcagagaagtagatacagtgagaaatgccagcaagactgaaggggctatgtcttcacatgcagctaagatgcaagtccgctggtcagatgtaaaacaaaccaaatatctaactgttctttttgttacgttgaatgtctgtatgcttcaactcagctaattagctatggtgtttagaacattaccttaatgaggaaaggttctagattcaatccctaacttaccactgtcggctcctggcagactaatctctgccaagacagcccactgctctcctacttgggagagagaggataggacaattaccttaatgaagaacatattttgcattgcctcccatataatttgcttttaagtttctatttctcattctaattccattgccttcctcaacaaactatcctaccttcccattttaattgcaatgcaaagcttccctcaggtttgtgagtctaaaggaaagctgactaattttcaattccaagagcaaattgttcatgtggaaaatgttggtttagaactgggttctgcccaactgcgccacttgttttcttagaaatgagaatttcctcccttagaagctaggacatctaagcacgtaagcaggaacaatccccaggttggttgtcacttggatgctcttaacccaatctctgcttatcctcgctgcaatagttaggaacagtaaatctacagtgaacataactgaaaactgcactgaaacagaaacttactctggataaatgttggaggactggagtttcttacttctttcctagatgatatatatttttaattcagcacaaattttgcaagaataacagcactgcacagaaaccacagcactctaattcactcatgaggatgcaagagcattcataaacagatcgaaagatgctagtccaatttgaattactgcatcatattcactccagggccatctctatgtgaagagaaagtgacataaattttctcctaggcaggcttgcactgatcctgcttggggagctaactgcacggagagaggccgattgggagagggcagggaagcagagatgggcactcagagaagtcccgttttgcacatggagtagaaggaactcccctgaatgttagcaaacaaatctcaagtgtttttgctcaacagtggcagaatacaaaattgcatttatggattcatgtgtttgtagagttcacactcatccacaaagagagggggagggagaaagaatatctcacatgtgcaagtaaatgccacaaaggagaaatacacctcactggcttttacttgcctggttaacagtttgaaatcaggattgacactatatccagataatgcacaacaggtctacaaaatgggttatttccctaaatacagccaggttttaaattaatgtaataattataattatttatcaggggaaccagcctgcaatatttcaatgtaggttcttttctattttccctaagtgttggccgctctgagaaataaagagaaagagtacaaagagagaaattttacagctgggcctctgggggtgggcatcacatgtcgacaggttccatgatgcccacctgagctgcaaaaccagcaagtttttattagggatttcaaaaggggaggggtgtacgaatagggagtgggtcacagagatcacatgcttcatagggcaataaaagatcacaaggcaaacggcagagcaagatctcaaggcaagggtgaaattagaattaatgatgaggttccatgtcccactgggcacgtattgtcattgataaacctcttaacaggaaacagggtttgagagtagacaaccggtatggctagaattcgccaggctggaatttcctaaacctagcaagcctgagggcactgcaggagaccagggcatatttcaccccttatcttcaaccgcataagagagacactcccagagcagccattttagagacctccccctgggaatgcattcctttctcagggttattccttgctgggaaaataatttagcaatatttctcctattccctttctgcaagaagagaaatatgattctgttctgcccagccccgcaggcagtcagaccttatggttatctcccttgttccctgaaaatcactgttatcctgttcttttctaggatgcccagatttcatattgttcaaacacacgttttacaaacaatttttgcagttaacacaatcatcacagggtcctgaggcaacatacatcctcagcttacgaagatgatgggattaagagattaaagacaggcataggaaattataagagtattgattggggaagtgataaatgtccatgaaatcttcaaaatttatgttcagagattgccataaagacaggtgtaaaaaattattaaagtattaatttggggaactgataaatgttcatgaaatcttcacaatttatgttcttctgcctctgcttcagctggtccctccattcagggtccctgatcccgcaacaattattaatgtgattaattttattaatacatagtcaatagttaatatcatttcccatgttcagtctcatgagctcatctactcaacttcagaacctatccttgtcaaatgtgtccttaaaaaggtcttcaaaataataaaattccacaaatacatggagcattaggtctgctttttattttcttgagtaatctgaagcacaaacattctctgataccacgcaaaaaggactctgaattgccaagacagctactttaaaaataaatctattattttggggatagatctttacagcttagagttcaaatcttgggagaccttgaagacaacagatggctgaatttattattggcccccatatttatctttattggccactgtgtttaggaataatgaaaataatttatagtgaggatacaccttaaattctaattagaggccgttctcttctagaaaactaatgtaataacaacctggagcctcttttcccccatttgataaagattagtattttacaattttaccttggtgaaagaaaaataaaatatggcctggacaatcaaaatttcttctcttggctgggcatggtggctcacactagtaatcccagcactttgggaggctgaggcaggaggttcacttgagctcaggagttcaggaccagcctgagcaatatgatgaaattctgtctctacaaaaaataaaaaaaaattatctgggtgtggtggcaaaggcctgtagtcccagctacttgggaggctgaggtgggaggattgcttggactcaggaggtcgaggttgcagtgagccgagattacactactgcactccagcccgggtgacagagtgagactctgtctcaaagaaaaagaaaaacaaacagaaacaaacaaacaaacaaaaaaagatttcttctcttaatatgcaccatgcttttaaaagtttgaatctaatgttaggtatgccaaatgtagctcactttgcatttcacataagttaatatttctccacagttgtaactggctcttcatcagatggttacaatccctagaacacttactaaacaggccacatgctgtctgtcatgtttcaagatctgtatgggagtttgactcagagaaaattaagaattgaatgacttgactaaacttgattctcactggcaaactcactctaaatctgattcccattttctacatctcacacagtttttattttattttattttattttttttttgacacatgtttagtcattaaagcttggagaggtcaaactaacagtcacactggatctgaataatgtccaaagcagcacagtaagtagccggtgttaatctgttgctaatttttttgatggaggtgtaaaagaaaggcaagaaaatctaattggctgtatttgggataaaattatagtgttatattttctggacaagaagatggaacagtggcaaagagatgctttaagaatccacagtactggcccatctagccgtatggatgccaacagcacattcttcactgggcctgctatttaatttgcatgcttcttgtgacacttgttccatgatatttcagagtagcttctcttaaagaagcagatattgtaaaccacagcacatccagaaaagtcgctctaccaaatcctctttcagcctcaactcttggggccataatatggtcagtgtaacctcaggccctgtgctccctaaggggcgtaggtggagctcagcggaggccctctcaccactatgcaacttaggacagatcacatttcctgagcctcagttacctgtaaaatgaatacatcctcccagtcctacttacttcagagagatgttatgaggatgcaataagacaaaataaaaaatgctatatatgttgatacttgtttttattatggttttaaagatccaggctatctgaattgtaaaccttttggtgctgatgtgagaagggcagaaaattggcttcttggaagccccatccaatcaagttaacactttatgaaggcccctacctgctttgtctctttttgagaaagttcaaggggtaaagcacctctctccaagtttcagctagtaattggtttagagaataatctattatactagttgggataggctaggttatgctggagtaacaaccccaacctctcagtgactgacttactgaatttcttattgacataaagtctgggcaacttcgggtctgagcagcagggtagtcacttttcttccatgggtagggggtctatgtcctggtttcccaggacagttcagctcaagcttactgtcctggcaaattattaacaacacccctttcagtccaaaaatcgtcctggtttggatgataaagattataatcttcatatcaatggaatgactcaaatatttagcctgccccactctctcaatatgaagttttctctatggacaggaaaagataaactggagaatgtagtatggattttcactgcctcattcaacagctgtcacttcagtttaagggccactggccaggactagtcacatggcccaactcactgctagggtagctggtaaacttagtcttctgagtgcccagcaaagagaagagaaccagatattggtgctaatatgctgtcttctatgtgtgcattgtgaggactgaagatatatatgggactactactcagtgactggcagcccagcctcgctaacttttcaattgtgtccaggtgactcagggccgaaattcaagcagggcaagtaagtgttgctcttggtggccttttcccattgggtgttacttttttcctccgttggttgactgagctgtcactattgaggctcttctctcacctcccagctagatattgattgtcactctcctttccctcatgccaaattgatcgccagcctacacaattactttccctgagatctctgaattgtccacatatgcattccctctggtccggaaatcttcagacagacaccttcaaagtctgttttgctttgaaaaatacactatcaagccttcagtaagacagttaatagacatgtttttgatgcaggctattttatagcaaatatctataaacatggaaaagcagcctgtacttgcaaaaaactttataaccttccaagattcactggcaaggaaaatggaagaggtgatttctgtcctggtttcttgtagtgttggtaaaaggatacttctaatgtttcactacttttacccaatatttattgtttaaaatacgcaacttaagacacctcaacaagtagcatgcttgatctttaggaacactggagtatgaaagtctgtctagatatttaataggtcaaactaaaaactgggggaaaaaaagtcaatttaaaaggctgcctctatgttagattgaaaacaaaacaaaacaaaacaaaaatgaaccctgagagtaatataatttacactggggtctcatgaatgtggattttgccaatcatcaaaatcatctggtatttggatagaaatttttctgccagcagctatgagaaaaatgagattccttctcttctccccttgcctatccaaacatcatgcatcctccaggttccagcttaagtcccatctcctgtattcctgacaattgtggcccactggagtgtctccttagtcctgaaatatgttttccctggaacatttgcaggaagacactgaggactcttgctaaaagtctagattcctaggtctacttgagacctagtaaatccaaatatctgagagtagaggccaggaatctgtgttttaaataagaatattcttggacatgaactatgagaaactccattctaatgttctcctaacttattcatagactaccctggcatggttacatacgaacaaaatgatttcatgtatgggtttcttagttaacaactattctataagctcattagggactcttatgcatatctcaagttttttcctactacccacatcgcacagttggttaactgtttatcttgtgtagatggaaattccctaaattaaggagctatatattgatttacctcatttgaggcgtattagatgctgaaaaataaaaggaaaagatgaatctaattttacttccaatgctggaaagcttaaaaataacaccttatgtaatatgaataattgtttcctgatgtattcattcattcatgtatcccctcatccatttatctgttcctctatttgataatcatctgttgaatgcctatgataggctttgtgtggtaatgagtaacttgaatgaagaaaaactgccaactgtaggagacgggcagacccacaatgaccccacaatgtattaatgtattaagagccagaagaggatgccaggggcatgaagagagttgagcatcaacagaggctctctgggccgggcgcagtggctcaagcctgtaatcctagcactttgggaggccgaggtgggtggatcgtgaggtcaggagttcgagaccatcctggccaacatggtgaaaccctgtctctattaaaaatacaaaaaaaattagcagggcgtggtggcgggtgcctgtagtcccagctactcaggaggctgaggcaggagaatggcgtgaacccgggaggcagagcttgcagtgagccgagatggtgccactgcactccagcctgggggacagagccagattctgtctcaaaaaaaaaaaataaataaataaaaaaaacaaacagaggctctctggagatgctgatgtactgaagttttgaaaaataagttggacttagcttgatggaaagggaattttcaaacataactaatgatcttattcgcaaattttaaattgcttattatgattttcttcataagaaatatgctttaggtatgtgtaaaatagtctctctctactgaaagtaagagcgcttcattttagtttggtatacatgctggcattttaatcaaacacaaagcattatagatcattgtcagcccacctacttaaggttcttccaatggaattacatgcacttaaagttatgttcactgctacatacatcctacatctcaatatcaaccaggcctcaagataatgctcctccaatgtgtacatatgcatatttgcagcccctgtctcattataatccatgtatttgtgcatgtattcccaacatttttgggtgctcaggtttcctttagtgtttggaatatgttcttcttgaccttggatgtctataaggatataaagaataaccacatcagaatatctgttgctaagaaagaactgctatgataaaaccaataccaataaccacaacattccccaaccacaagattgacattaaacaatagtcaagtgtcttcaagtattttttatcatggaatacaagcttttatacagcacttttattgtacattcctgattaatgaaaaggattttggaaatacattaactttaggccaaaatagtgtccatttattcttaaattgtcaatggtacaaaaaagaaaaaagcaaggatacttgaggggaaagggcagagaatctatatactgaaactaatttttaaaaaaatgtctttgatatttaaaagcaatagaaaaagaagcacaattctcagataatagtataaaataaaaaataaggaaaattaagcattgataaacaccaaattcccaagtgataggatttttaagatgtaaagaatgagtgataatatactacattgattaagctgctacagaataccatgacactatgcacagatacacacaacattattttctatcttaaagctgtgctgcgggatttttagatccaggattgtaagtttttccccccatctcactacacaaacatgagaaactgtgcagacctttgctttctttccatccacagaattttactgtaatattgataaagacaatagtacctacgctatacagatgttaaaaatcaagtaataagcaagataacctgattccagttatcactgcctccctcaaaacaaaggactgcgctgaaagaagagcagatttaattgtaaagtgcaaagacttgccccagattggaaaagagagggaaagggcctgttttgcagcaaccagttagaacacggtcccctaggacttaattatctatatcttgttaggctataataggggcttaaaatgatattgcaggttttctgcaaccaagaaactgattagtgaagttgagtaaatcaattgtcaatcttcttatgagtgaacatggacagcaaccccagacttcaatagagagccttcattatcacacagcagttaataagcatggctatttgaagcacatcaatacagaagaaggagcttgtatccacatcaactggcagtgtgtttggtgttgctcatttcctgattttcagtttggacagaagggatgattatcattctgtgaaccacgttgctgatctccttgctttgacaccatactcttcaggggaattcaatatgttcctgattatctcaatttcaaagccaattagaatatttacagatgcggaggcccctgagccctcttttgcatggctattgctggaccccttgcttccattctctcttttctcttctggacctctgctttcatcctgccctcttcatagctgtttttatctctccaccggatcttctttatcagatggcaagcaagtaaatttatcctaatggatgcctcctttgtctcctttctcccgttgcaatctattcctcttttctcccttctccccactacctgttataaaaaggaatttatatgttctgctttcacgtttttcctcaacaaatgaacctcaacaactaacttcaatctgactttcccctgatcactatacttacagtggtttattattttatttgttgagacagagtcttgctctgtcacccaggctggagggcagtggtgctatctcggctcactgcaagctctgcctcccaggttcccgccattatcctgcctcagcctccctagcagctgggactacaggtgcacgccgccatgcctggctaagtttttgtatttttagtagggacgggggtttcaccgtgttagccaggatggtctcgatctcctgacctcatgatctgcccgcctcggcctcccaaagtgctgggattacaggcgtgtcagagtggtttcttatcatcaatgggcctgaagtcctccccttcaatggctttttctgcatctttctggttatgtatgtgcctgcactggccaccccttccctcctgaagttttgctctcccttgcctccatgactgccttctccagagtcttctccttcctatctcagttcctacttccctcttccatcaactacagatggccacacccctgtttaggatctcagtcttctgtttgccctatctgctcattctgtctctcaaatcatttactgccccctttccttcagatttccaaacctaaatctccaagcctacacctgtctttcccattacctactgggcatactcaacatgggccccaccagcaccttgctctcagcacatctacaggtgccagtcaccatatctcacacaggctctctgccttctctcgtctttcttatgaaatctggtactgtctgccagccctgggcagcattctcaccccttattatgctttccctggtggttcaggagtataaagcctgggaactgcattttctgactccactgtctacattcaggaactgttaataaggtgcaccagcagggttttgaaagctgaaaacaggtgacatttttcttcctctgccaacagtggtgggattagcgtgtgctttggcaacattaggttttggcacagctggctggactctgcaccctcctttttgtcagcaggctgcagggctgctgggctgttgtgacactcacagcagctccacacattttccacctttggtagtgtattagtccgttttcacactggtgataaagacatgagactgggcaatttacaaaagataaacatttattggacttacagttccacatggctggggagacctcacaatcatggtggaaggtgaaaggcacgtttcacatgaatggcagcaggcaaagggagagagcttgtgcagggaaattcccatttttaaaaccaccagatctcatgagactcattaaccatcatgagaacagcgcaggaaagacctgactccacaattcaatgacctcttactgggttcctcccatgacacatggaaattgtgagagttacaattcgagatgagatttgggtgggaatacagccaaaccatatcaggtagcatcagcaagctcctaattcagggaccacagctcagcctgaacttgacagccattagaggccctctggacttttgctccttgaaccctttttttgtgtgtgtgtaggcacctacatcctggtttacatccttctgtgttggaagtgtcttcacaggtctctattttcctgactgacaatgataccaccccagtcacaggatgaatggcctggagcatcttttcaactgctttctctttcccatcaaaatcccaactcttcccaagcactgccaattccttccaatcaacagcttcctctttccttgaccaatgcctctatttcctgtccttgaactgctcttaaagtcttctaacctgtttccctgactagtgagtcactccatcatcctcacccaatagcaggtccatctcttcaaacaacaatttttatcatttcaattatttgattgaaaaccttccatggacccatccttactgtccgcaagacaaagactgaaccacacagcaaggcatttgaaacacatacttattcctatgcccttatgtctccctgttcttcctcatgtactatatgtgcagatagccatggatacttgggattcattcttaaaatatatgcctttgctttcctgcctccagatctacttctcattttccctcgtagaatgtgactcccatccaccaccagtgaagctattcaaattctgcaagaattagtccaaaagccactagaaatctccatctccaaatggattcctgctgcattttaaaacctaatctatatgattcatcccattctcagttttgcacctcaacaggtgtgttgtcccttatggcacaatacaggtaccacttaacttttagttgaattatactgtctatgctgggcttgattttttggtttatcaaactttgaacaccaggaaaaacattagatcaagttcacttaccatgtttgtaatccaaactaaaacttaaccttactgagatctgggtgctgtggtcttatcacaatttcagccttacgttttcaatattaaatgatgtactccagtgaactgcccaagcctctttggcaaatggcggttttatagagactactgcttgaaatcagtggatcatgagatgataaacgttcccatgtataatgttttccattgaaagactttctaatttataagcaagatctaagattctaaatgggtaaatacataaagttgattcacatagaattgctgatatttgatcacaattgacctataaaaatgacagttttatatggttcaacctaataaacacattaaagtaaattttgatgcgtagtatttgttttcacagcagggctcactttatctaataaagcacaatgaacacatacactttataacagataagccagatggtaaaaggctttaataatgacagcagtaatcatgattaatattcattgagcacttgccatataccaaccatcatggtaagaatgctacataaattatctctttttttttcttatcacagctcaattttaatcaccatttgatacatgaagaaatgtgctgcttaaagtggccaagtaatttgtccaaagtcatataggtactaatcggtgaaagaatttgaaataaagaagacctcttcaagagttgtcatttttgaccagataaaagaaccgaactcttttttttttctcctggagacattctgacttttcattttttggtccctatactaggaggaaggatgaagaataaatataactcatggaagagctcaaatcccaactcctccacaaagccttccttgatcacacggctctgatccctctgttcattgtactactccatggtcatgaacatgtctgaattttccaaataatgataaagcttcatcagggtagtgagcatgttgaatgtgcatcatctcctggagcaaggagtggacattgtatttccatccaaacacaatccattcattcgcccactaattattgagtcttaacattgttgggtgcaaacaatcctgagatacaagacccagtctctactcaaaaggaacttactactgcttaatgaggagatgaacaagtgtgtcgacacaatagcatgcagtaagtaccatgaaagaggtagctagactgtgctgagaggagagatgtgggccacctggaagtgggagggcaggggatttacagagcttttccagaactgaaactgttgtggtgaagcctggaaaggtaagaagtcctcgccaatggaaggacttaagaaaaggctgtccaacaaaaacagcaggtacaaaggcacaaaaaagcctgcaatgtttgggtggctgtgagtactggcatggctctaggacatgaacaaaaaaaattagaaaggtgggagagagaaaagaaataggaaggagaaataaagaaagaaggaagagagcaaatttgctcttgaatttagcaaaattcagatgacagtaaaataagtagccccatgctccgcagtaaaaccaaataaaatccgagctactgtccggtggccagatcaatgccaatgaccctgaggcccaggcctacacacaaaagagcttggtgtgtgagagcacatgaagtctgacgatttataacagattttgcaaatggttggtaatacagtgacagtggcacaaaaaaaggtgatgaaaatagagaagtttctatttctacctgttttgataatagcggctctttagctgaacagatggtgcatttcaccaaaatctgatggaaacaaatctttacaggccttccgtgttaagaaataatttcatagccttcccaagagatttggaatgttctttgtctaaataaatataatacaaagaaaatggtcttttggaatccgtaattaaatagtgttaatgctatagaagaaagcgcggtctgacggctatctaaaatgaatcataataaaatgagagaaggttttccaagtctggacatgttcctagcaacattcagtgtaaggaaggatttcattatgtttcttttaaaaagtttgtgtctgaaaggttccagaaaggatagctgagtctggccaatagaacagagctaatggccacagccaaggtgatcaacctcaccaagaagatgtcagctttcctcactaaaaaaaaaatgtattttgatggggaattaatagatgtggcaatgcaatatttatggattgccactcaaatgaaaacaccttttaatatgtaactgagacacataacaaatttataatgccttctacatttcaaaatttgcattgaataatggtaaagggcaaggaaactagcccattgttaactgattgataggcagtgtgaaatgtgttcaatatttatatcctttccacaccaaccttctatttttatttatatgatcatttcctgacaaacataatatgaacgatgtctgcagaatttttattaacaaagtgcaaagacaatacctctgtgtctatacaaaaccatctgctaatgtctcatgtcaaaacctatttatgttattttctttgttcttcctatgttttctgaaggcaactatttgccattaaattaatcctgtccaccttcgaggcatttatgcattcttctggcatttcacattctttgggaaacccttgggtatgcagatttcattacaaaaattcttaaaacaaagcagggtcagggtttagaagtataatatacctttcctttcctaatgtagaaccagaaggctatgcacaaatacagtatttcattttgcaattaagttcaggtgaattattcaaaacttcaaaatgtgaaatatgccatgattatcattattcaaacccctgtaattctccaatatttttgaatggaaacatggctgaaggtgcccgattagtaatgaaaaaacaatggtatagcattcttgcctgtagattctgaaaaaaaaaaattgaacactttaaatcttcctctctttactagactgtacattcattcaattgacaaatcctcatgcatgccttgggacttttctgtaaggcaagttcttccccgcccccccactgtttccttctctccccagtctccccaaacacatgaaagcagtaacacaaaagagatttccctggactgaaatggaggccccagaacatactttataatcaagatcatactttgcaatgggcaacacttctcccctgctacttaatttcttggggttatacaagatggtaaaaaacgaaagagcagcaaatcacagctcttaatggagggcaagcaagggcaaggtgaagagtcttttccaatcttcctcagtctctatctcaagaccatactgccccaggaagctcttattgaccttgcaggtcttgatctttttcatcctagcaacccctcaagaagtgatttgtgctctgtaacactattttatcactcacattgttgtctcccatagctttcctcaaatgtcctggggtgcctattctgtctatatcccaacccaaacagaatggtggtcaacccaccatgcaacctgggcggtgcaggggttctatgcaatgagcgcctagcaatcgggttgtcttaggaagccacgtagaagaggcctgagttcttgagggcacactgccttgtttttcttttggtttaaagttatgacccaccagaatactgacatactgtctactaaggagttaccctccccaagagacaatgattatttgcataaggatttcaacagagaagtagaagtgcaaagtagttaggacaaatagctctggttcagacagtctgggtttaagtcttctacttaaactagatttaatatctactacttagatttcatagccctgtgcctcagtgttctgactcctagaacagggtaagagtacttaacacattcttaaggtggtatgaagatgacatgagttaaaaggacttagaacacctagaactgtgcacagcaagtgctcttattgcctaagtgctccagaaatgtatttatcatttgtttggggatccacaacaattagcaggagaccttgaaatacaggccactaaggcttttatgcagtttgcttttggcagatactcagaggcaggaggaacaccaatcttttgccacagtaattctagggaaattttatctcaaaaagaagccagttcacggtcagcatgatataaagtcacagaacatgcctagaaggtgtgccaagtggagggtgcctaaaagactttctaccctttagccttgttgctatttaaaagtcaaccattagaggttcatttctctagctttaagttcttgcttactaaaatgcaatgactcttggatggaaaccatattaatgaagaaacaggcccaactatgggaatgaagacaaccctgaagtagattcctaattcttctacttttctactgtgtcctatgataccgtggatttcacttccttaaacttctgttttagcaactgtaaactaggaataacttactaagttgctatacggagtggcaattacagaaaactacatagcacagtgcctgggagataggaggcactcaatacgttgcagctctttttttgttattatcattcaactcactggggagtttatcagatttttcttaagcgaaaattaatcaatagggtattttgataagggataaagagaagcaaagaggagggcactggtcagtggtggggagaattggggcaggggaaggaaggaaaagtggggaatgataaaatggaagcaaacttcacctgctttgaatgtcagggcctggcctgcagaggactctgtctctcctgtcatactgttttacaccttaattaaagttccttaattaagaacagggaaacagtccttcacatatttatctctgaactctgattattccttgaacttgtatcccaagaaaaggggatgaagccacataagatttggcagctggcattttcattttccccttattgccatttgaacactagacctaagagtgcattggatgtatctaatcatattagaaaagtggagaaaataacccaaaccaaacctaagagaaggaaccttaagatttgaaaatgcagctaactatagataaaaatcataatggaggattaaaatttaacttcctctgagacaggcaataattattgttaaaaacaagctcacttatatcctctggtttacccttccttagtgaaatctgacaaggcctgtgtgggtcggagcctgcacactgctatgggagagcactggggcagctgcctgccttctcctccaggcggtcactcaccagccatgtggcactggccagttgttacctccacacacttcagtttcctcatcagtaaaatgtgcttgtcagaaaatagttactaaataaatgtcaaatccaagctaattataactgaagtcatttatgaattcaatatttattatgcatctgccacatattaagtgctgctgtagacattggagccaccaaagacgacatcatgggaatccatctttgttcagctaaagacaggaaggttgctaaggaacacagcataaagaacattcaaatgataagctgtagaatttggacttggaccctactgctagatgagaaacaatgagggtttacctaacaaaagaggtgtttgaaaagctgagtcctatggtggtcagctgcaggcaaggcaccaccacttagtccagataagggatgagcaggacccagactagggcagaaaacagaagaggagaataaaagacatgcataaaagatatgttttcaggagtcaacaggacttagaggcaagtacatgaatgcatgaagacaaggaaagccagaagaaactttggggttcaggggaagtggtttcacagtagcatccacagaggaacttcaagaagagatgctggttggggcacaggataatgtgtcttttgtttttaaatttcatttcatcctattaaagcattctgtcctttaaggactaaaaatccgggagaatagaacttgttcaaaataaatacactgtggtgagctgcgtgcaataacgcacaagacacaggctaggaggaaggcggctgtggtaaataattctaccctaccacatcagggacatcctcacaacacaaggtaaaatctaagtgggattgtgaaaggtggagaagcaatcaccaaacggacaaggggagggagactagtccagggacagggaagaataagagcggagcccatggagtggaaggtgtcagggaaatgcctccaggcaccaggacggacaatgtcagcagttacctacttgtggtaatgacacaaatgccaaaataacctccctctctgcccgggaacacacactaaccctccattcagcacaccccctcaggaagacctggcgaaatgaaaactgtagactggcctttttttatttatgttaggggaaacagattatttagccatgacagaagcaaatagtttccatgcactatgcattttaacatttcagaaagcagtacccttagaggaaaagcaggttacggcatgcagagattatattggaaagaagcatagacatattcaatgcctagagagctgggtcccccaggaaggagcgaatctggggatcagtaggaggaaattggatacagtgggcctggagggaagggaggcccagaaatgaacaaaggggtccttagcagggggagtggaatgggaaaaaatagatattcttccacttcaaatttttcctggggctgaatatatgttagaatgcttatatctaaagccttgaagaaaaagtttctaatatatctctgtgaatgatgtgtgtgcatatacacatataagtgcatacacatctactcacatatgtgtcagtaagtgtgtatacacaggcacacatgcacatgatgcttaatccagggatatgtttgctattgtgtaaactctagtttttttattgttgtttgttgttttttcagagacagagtcttgctctgtcgcccaggcgggagtgcagtggctcagtctcagttcactacacctctgcctcctgggttcaagtaattcttgtgcctcagcctcccaagtagctgggattacaggtacatgccaccacgcctggctaattttttgtattttagtagagacgaggttttgccactttgcccaggctgttcttgaactcctgagctcaggaaatccaccctcctccacctcccaaagtgctgggattacaggagtgaggcaccatacccagcctaaactctagttcttaagcaagggaatggacaatggtatgtacacttctgagatgatcccaagggatcattatgatatattttctcctttggcagaggccggacctagcatctggcttcagccaacagaaaacagcacacttgatgggatgtcacttcggtagttacatgaggaaagagtgtgacttccatcttactagtgttggggctaagaacacgtcacctcaaaatatgactgtaggagactaggatatactagccccaaatatattcctctgacatattttgagctggttattctgagaaaatgcagacacaggagtagctctgaaaacctctccttttgtaaaagaaattgacatctacaaaggaaatcttcattagtagaagtatttgtatcaggaagaaggctgctcattatagaactttcattacttgagagcaggaaatgccattccaaaatatgctgctttgaaatgctgattacttcaaactgagggcacctaggaagggaaggtgcagggaggggctgtctctgggctcccctttatctgcctaaagatggatcctccaggggcggctcagctgtcatgaatctcctctctgggaatcttatcaagtagggaggtctgactcatcacagagaaaaccagagttggacacaatgtccaatcacctgttcttcggagtgtccattcctcttttccagaatcaattactcccctgtaagctgcctaaatgcccctcctctatcccctcggaagatggtaatatgcttctagatctcactgggtttggggatattcacttttccttcctttgatgccctatgcatgtaataaatgtgtccaccttttctcctactcatctgtcttacatcaatttaatttgtagctcagccaaagaaccaagaaggatgaagggaagccatcttcctcgcccctacactagcaaactctgtattaccttctctgctggctcactttgatgaggcaaactgccacgttggagaggcccatgtggcattgaactaagagctgcaactggccattagggagtgaatcccaccaacagcaaatgagcttggaagccagtccttctccagtggagcctcgaggtgactcccatcgcagcccacaccttcagctaagcctctgagaaatcctgaagcagaggacacagcttacccatgcctggatcccagatgcacagagattgagacaatcaatgtgtgttttgtttgagggtaaagatttgaggtaatttgtcacaggacaagagacaactagtacaagcaccaagtgttaaacagcttctctccattcaaacttttaagttttctccatattaatgttcaccagcactttttcatactgtctcttagacctgtgaatattttttcatattattttaacatatacatatatttgttctattataatgttcttacatttcttcatcctgcttctgtttctcctttaagtaaagcttggttgcaaattatctttattgattttttataattgtacatttattttagatttagggggtacatgtacagatttgttacatgggtatattgcataaagctgagatttggggtatgaatcccatcacccaggtactgagcgtattacccaatgggtagtttttcagcccatgcctctccctcccttccacgtctagtagtttccagggtctattattcctatctttgtgtccatgtatacgtagtgcttagctcctacttgtaagtgagaatatgcaatattcgattttctgttcctgccttaatttgcttaggataatgacctccagctgcatccacgctgctgcagaggacatgatttcattctttgttatgggtgtgtagtattccatggtatatatgtaccacatttttaaaattaaatccaccattgatgggtagctacgttgatttcatgtctttgctattgtgaatattgctgtgaaaatcatcttatttataatcagcaaggaacttattccctatcagtccttacacccaggactggctctcctgcatatattcaatatatagcctttgcatttgagatatgtatgtatgtcttaactccttctcactgacatgaatgtaaactatataaaaacattaaatagacctaaccataaagtataaacatctatgacccaaatagaattgtgtgtacttcacagttcttcaatgcatattgggattaagtttgcagatatagtacaagctcttccaaagaaaattcaaaggatactcaaaactatctcacaaaaaagaagttaatgtcatcacctactgtatatatttgaaataaataagttgcatgaaaacaaactgtacacagacacatattttagtagactataagctaagaatgacaactatcagacctttacaagatatcaaatgagaataattcaaagaaaagttttactcatatcttacatagcactaaaatgtaatactcattatgcaatcaaattatgaatctgaataagcaaacataaactatggcattttatttaattctgaaaatttagagttaacatatctttcattaaagataaaacatttttaaaagatgttcaaaacctcatttacttgtatttagtacactaaatgtaggagaaagttatacacttattttaaacaattataatttccccatattgaaaacaacagctgtggaagaaagtaattaacatgatttactatataatcattctatcattatatgctatttggaaatatagaagcaaaactgagtagctttctagcttgcgctcataaagaaacctgttttctcaatcttctcctcttatttatcaactttatatgaataacagttttgttaatttaggagagaacattttatgatatgtttccttggatttgggaactcagtcccagctgcctagcatgtgtggctagagccacacaccatgttgcaaagagacccaccacacatcttccaggagtgataatgcatttgactatatgccatatagaaaatatgatgatggatctgaaaagataaccaagtcgtatagttgtctactatttttgactatgcttttaggtgttttgaaaagaatgataataccagatgaattagtccaattaccaccctagagaaacggacaaagaaaatgtgcttcctctcttcactttaccatccttattaccatccaattttctccaacttattcctcctactatcttttgtggttgaagtatgatgttgcaagaagatttaaaactaggcaacaatccaaaactttttcctacattggggaaaatgatttccagtacctagatctctaaacatgactaaatgctagttgatacatacaatgtaaagctactaatcagtcagcatatgtttatttgctttattttggcttcggagaaagaaaaagcttctactttgcatgcttccaggaagagaaaactacgatcatgtcattcaatgaaagttagctcactgatggaaagtacaggtgtaggggctggtgaataaagtattaccgcttatttctgagtggattaagcatctgtgagaggtgtgaaaaattgtcaaaagttactgttgggtgctgtgggtagaagtgagttttagaggagagcctgacactttgttaattatggcatcaacactccactaaatgttagcaaggagcagacctagagaaagacaagaccaagaggagtgaattcagaactttccaaataactatagcctgggattagtgaacagattatttctagcacagattttagtgatatttctatctgagccacaaaagattcaagttcattcttaagctccagggattgtagtcatgatgagactgcccagaaagggtagaacatattattttaaaaaatttttaagatccacagtacatgtgcatcatgtgcagatttgttacataggtaaatttgtgccatggtggtttgctgcacttatcaacccatcacctaggtattaagcccagcatgcattacctatttttcctgatgttctccctccccctctcctccgacaggccccaagcctctgttgtttcttggctttttaatacctgctattctgactggtgtgagatggtatctcattgtgattttgatttgcatttctctaatgatcagtgatgttaagctttttttcatgtttgttggatgccataaatatttacttttgagaagtgtctgttcatgtattttgcccactttttaatggtttgtggtttttttcttctaaatttgtttaggttccttgtagactctggatattagacttttgttagatggatagattgcaaaaattttctcccattctgtaggttgtttgatgataggttcttttgctgagtagcacatattcttaacatggtcatctaaagtcacagtcaactaaatctgttctagtgtttttttttttttttaagaacacagtcaaggatcattgtggattcactctcaggaaacttccctggccttaagaataagaagaagcattccagaaggaaatcataatgaaaaatgttcaagaattcagaaaatcaggcacctttcaacataagcaacattttgctgctattctgaacaaaccataaagacttattgggaggaaaagatgtgaccttcatttaaactggctttattagatttcccttctaggcccaggcatatttagtcaaaggagagcttggatcagagactgaactgtttttgagaaagtctgtgcgctgaagccttgcagggaactatccttggtgctggcctcgaattccttctgccaacacctctcttacatgctaatttgatcctaatctttctatagacaaagttcctatcactgtggtccattgtgctcattgagatacacttctcgcttgatgaatatttttagctatggtccagccaggattcagcgagacctctagcatcacatgcaactcaatgctagcctgtctcttctgtcctgctctattcctgtctatgtcacccaggatacccaccagggcagttcattccaatgcgcccttacaaagtgctgtgagtcatgctgttgagaagggtgagagactcacttccaagggagtaaatgcatcagggagggcaagacattctgcaactggctactgtagctatcctttcaagtaataatggcgtctccctgtacctacttcccccatgacctggtaaccattaatatgactatgacaagaaaacatgacaagcgtcaaggtctgatggttctaacgcagacaggtcagttcatacacatcaccccagcatgtaacacccatgaaccatatgacaaataccctcgtctcttcttttcacttagtgtagctcctaatttaaaggattatagattatatgtcactaaacaatttattggtacctatattccaaaccccattttaagtgctttgcatgtattaactcatataattttcaagataataatttctatgtgtagttatcatacttctccccaataattagatgaagcacgtgagacaggcaggtcaagtgactagctcaaggtcacacagagtgtaagtggtagagctggaatacaaactcaggcaatttggctccagcatccattatccaaactgcttcatgacactaagggtatatagggagttgtaaaggggactcctgtctcagaggggaggctggactagaactgttaggttccttccagtttgaaacttctgtgattccaagaagaaacatatttttcttatacaaatgatcttttccaacaatgcatattatatgctaacatacaatttataaaattataattcatttagaaattatttttggctcaattgctcaggtattcaatttttgcagtgttgcatatgtttatataataatatttgcatagtatcactttgagtttctacttgcatgttaaatttttaaatctcataataaaattcctagagggaattatttaacatacctctgaacatgttttctcatggacccagaaaagttaatataaattcaaaatccaaaacgttttgagcatcgacaagatatgcaaaggaaatgctcattggagtattttgtatttcagatttttggatttggaatgctcaaccagtaagtacaatgcaaatattccaaaatctgagaaaatctgaaatttgaaatacttctgtttccaagcattctgaataagggatacttatcttgtattactgtccttaacatttttttattcttagaggaataaaaaataagatatttcaagtacatggattttccagataaattattagctgcccattcaatcaagcaaacttaaaaagtgtggaaattactttccagaaatgaagcatattcttttaagtcttcttggtatgacctgaagataattttacttttccatgatcatttagaataatcactataactatcaatgctgagcatatatcataaatttcctgtccctttccttaatgtcacttgtatgccactgttattgccataggtacctctaagagtaatttatatccatacaatactcctcttgctgcattgctatgaatttagaaaccttataaccaagttggttagcaatgtaaaacaaggtaggagtacactatttataagtgagaaccacagtcctcaaaaagtaaagcacttgcaatttagtacatggatcctaaggcaactgctttaacaacaaaacctttttaatttctttttagattttgatatagtttagatatgtgtccctacccaaatctcatggtgaattttaattccaaatgttggaggtagggcctggtgggaggtaactggatcacggtgatgaatttctcatggatggcttagcataatcttcttggtgctgcttagcacaatcctcttggtgctgttctcatgacagtaagcaagttctcatgagatctggtcctttaaaagtgtgtggcaccttcccctcgctctcttgttcctggtttcaccatgtgatgtgcctgctccccctttgccttccgccatgattggaagcttcctgaggcctccccagaagcagatgccactatgcttcctatacagcctgcagaactgtgggccaattaaactttttttatttataaattaccaagtctatagtatttcttcataggaatgcaagaatggcctaatacaggttctcggctatgtcctagggaattgaggtcatgacagatgagtgactctcccatacattttacagcaacataggcagttgtaatttttactacagcaatgaggcagataggtatcttatgtcagatgctgtggtaagtatatcactgtggtaagtaagtatattatgacattttcttttgccacaattttctgaggtaggcattactgtccccatttgtagacaatcagatcacagagttaaagtaacttgccccagaccaatcaaaccttgatagaggcaaaattcaaacccaggtccctctcacccagcgtaccactacatggggagcagggggaggttcatttaaggaagaaaaaggggttgctagataacaccattgtggatccaatctagcttgtataagtctttcaaaaatggttcatatttaaaagtagacatgacatctagggtgctatgatcggacacctgcaatcagtcaatatttcctgaaaatctattacatggatttttataagtatctattacaagggatttcccagtcccctgaaatgagcgctacttgccacatgtaatggtataggctaacaattatccccaggcatatcaggctgtgctaggggacacaaaaaagaaaaggaaattggggcagtgaacatcagtggtgccagaagatgctccctgactattcactctcatttattttcctgctccaaacaagctataatcgattttggaaacccattggacaaaaagaaatgtttacaaggatttttctggttatatagctaactcctttagaaaagaaaatatccctcaggccctggtaagattggctgcccaaatcaagaaaatcctctcagttactacgcagctgtcagtgcaaacaggcacttgtagaagctgttggtcaaaaccccctccgacacagaaacagtgtttcagaaatgcctctctagtttacacatgtagaaatgccgtcactggtatagattcggtttcagggaagaaaataagaagtttaatcactgagaaatttcccatcaaatcacagaatcagaaaattaactgtgagatgggaatgaccttgggggtcacaggggccatctcatgatgaagtattctggggaggcacctgttcttagggtgatggatgggcacctcacactcagtgcctgcaagggctgggcaaggaaagcaagttgagggacaggccaagggagcagcccagccgccgtgtttgtctctatctgaccacgcctgctgggcaccatggtgagcctgtgtcgaaaggtctctcagttctcagaagaaggtgtaaatccgaactttatagatatctccatatttttaaatggtggaaaggatctgggggctgcatgaggaccccaggatgaaagcttcacctctgattggaaaaacaagtgactcaaggtaagtacaaagcattctgactggtcatttggatgaagctaggttgacatgtggaaatcttaagacataaaaactaagttattgcaaatattattttttatcataaatagcggatacacaggcacaaagtgaggcttggggattatctcagttcaggctgctgtaggggaataccatagactgggtggctaaagcaacagaaatttattctctcacagttctagaggccagaagtccaaaatcaaggtgtcagtagggccatattccctccaatgcagcgggaacctatcccttgtctcctgcagcttctggtggctgctgccttccttggcttgtggctgcatctctctctctctctcacatcttcacattgcatcctcctctatgaattctgtgagaggatatatgcattaagggaccatctggataactcaagataaactcctcctttaagatcaataatcagagtaagatggtggaatacaaggctttgccgattgttccccctacaaggacaccaagttaacaacttcatatacagaaaaaaaaaacaccttcataagtaccaaaaatcaggggagtattcacagtacctgattgtaacttcatattgctgaaagaggcactgaagagatttttttaaaaatcctgaatcactgacaccatccctcccctacccccagcagcagcagaggcatggtgccaatagcatctcttggtgctgggggagggagaacacagtgattgtgaagcatcaaattcagtgctatcttgatagagcagaaaggaaaaccggaccaaactcagctgctgcccactctgagagggagcatttaaaccagcctcagccagaggggaatcacagatcccagctgttggaacttgagtgcctgcaaaccttgccactgagggccacattgctccatgtctccgagtaaacttgaaaggcagtctgggccataaggattgcaacttttaggtgagtcctggtgctgaactaggcccacagacagtggtctgctggcgggtgggtggggcatgtgactttctgagataccagctggggcagccaagggagtgctggcatcacccctcccctaccccagctgcacagctcacagctacaaaagacaccccttccttctacttgaggagaggagagggaagagtagggaggactttgtcttgcatattggataccggctgagccacagcaggatacggcactggtcagagtcatgaggccccacttcaggacctagttcccagaccacatatctagaaacactctgggccaggaaggatcccactgccttgaagaaaaggacccagtcttggcagcattcctcatttgttaactgaaaagtccctgggtcctgaataaccagcagtgatgcccaggtactatgtaggtaaggaccttggtgagcctctgagacttgctgacttcaggagaaactcagtaccttaccagctgtggtggcaaaggggcaaaactccttctgcttgagaaaagcagaaggaaaagtaaaaagggctttgtcttgtaccttaggcaccagcacagccacaggggagaaaagcaccaagcaggctcttgggtttcccagttttaggacttgactcttggatgacatgtttggaccttcccagagggaagggcaatgccctgaagggtaagtcccaggccaggcagcatttaccagaagttgacctaagaaaccttgggccttaagggaacatttgctagtttggcagtactcctcatggcttgggatggcagtgggtatgggtgaggctcctatggatttggaaagaagagggaggaatgagaaggactaggtcttgtggtctgagtgccagctcagccacagtacaatagaacaccaggtagacttctaaggtttctgattctagtccctgactcccagatggcacttatggacccacctaggggcctgggggacctcaccaccctgcagggaaaaacacaggcctggatggctttgccacctgcttattgtagagccccaagggctttgagaagatacaggaagtagccagggagtggttacagcaggtctcgggcgagacccagtgctgtactggcttcaggtctatatgagtctgttctcacagtgctataaaaaaacctgagactgggtaatttatgaagaaaggaggtttaattgactcacagttctgcaggttgtacagaaagcatggttggggaggcctcaggaaacttacaatcatggtagaaaggcaaaggggaagcaagcaccttcttcacatggtgtaccagtggggagagacagagcaagcgaagggggaagtgctacacgtttttaaacaaccagatctcatgagaactcactatcatgagaagagcaaggggaaaatctgcctccatgatccaatcacttcccaccagctcctcccacaacattggcaattacgattagatatgagatttggttgaagacacagagccaaacaatatcaaagtctaacctgcacagtcttagtggtggtggccactgaggtgtgctggtatcactccactcccagctttaggtggctcagaatagagagagatactttgtatgtttaggagaaagtaagggaagagaacaagagactctgcctggtaatacagagaattttcctgggtcttaattaagaccatcaaggtggtacctctatgagtctgcaagaaccacagtgtaactgggcttggggtgcccccaaaggaagatacagcttagatcacaacaccgaagtcctttcaaatatcaggcaagccttccctataaggatgactacaaataagcccagacagtaaagactagaatgaatacctaactcttcaatgctcagacatcaaagaacacctagtaggatcaacaccacccaggaaagcatgacctcaccaaatgaaataaataaggaaccagagaccaaacttggagaaacagagagatgcgatctttcagaccaagaattcaaaatagctgcgttgaggaaactcaaagaaattcaagataacacatataagcaattcagaattctatcagataaatttagcaaagagattgaaataattaaaaagaatcaagcactaattctggagttgaaaaatacaattagcatactgaagaacacatcagagtcctttaacagcagaattggtcaagcagaagaaagaactagtgagcctgaagacaagctatttgaaaatacagtcagtggagatgaaagaaaaaagaataaaaaaacaatgaaccagacctatgggatctagaaaatagcctcaaaagaacaaatctaagagttactggccttaaagaagaggtagaaaaagagataggagtagaaagtttattcaaagggataacagataacttcccaaacctaaagaaatgtatcagtatccaagtacaagaaggttatagaataccaagcagatttaacccaaagaagactaccttaaggcacttaataataaaactctctaaggccaaggataaagaaaggatcctaaaaacagcgagagaaaagaaacaattaacataagctgaagctctaatatgtctggcaacagactgttcagtggaaaccttacagaccaggagagagtgaaatatttaaagtgctgaaggaaaaacacttttaccctagaatagtatatccattgaaaatatccttcaaacacaaggaagaaataaagatgttcccagacaaacaaatgctgagggatctcatcaataccaggcctgtcctacaagaaatgctaaagagagtacttcagtcataaagaaaagaacactaatgagcaataaatagtcatctgaaggtacaaaactcaacatttatagtaagcacacagaaaaatacagaatattataaccctgtaactctggtgtataaactactcttattgtatgtagaaagactaaatgatgaactaataaaaataataactataacacattttcaggacatagtacaataagatgtaaatagaaacaaaaaaattaaaaatgggggaacaaagttaaggtgtagagtttttattaattttctttttccttgtttgtttatgccaatagtgttaagttgttatcaggttaaagtagttggttataaatagtatttgcaaaccctatggtaacctcaaactaaaaaacatacaatgaatacacaaaaactaaaaagcaagaaactaattcagatcaccagagaaaattattttcattacaggaagacagaaatgaaagaaaaaagagaagaccataaaacaaccagataacaaataacaaaatggcaggcaaagtccttacttgtcaataataacacaatgtaaatgtactatactctccaatcaaaagacatagactggctgaataaacgaaaaaagaagacccattgatctgttgcccacaagaaacatatttcatctataaagacacacatggactgaaaataagggatggaaaaagatattccatgccaaaggaaatcaaaaaagagcaggagttgctatacttctatcaaacaaatcatattttaagacaaaaactttacaaagagacaaaaaagtcactgtatatgataaaggcatcaattcagcaagaaaatataacaattttaaataaatatgcacacaaccctggagtacccagatgtataaaggaaatattattgcagctaaagagaggaataggcccaatacaataatagctggagattgcaggccccactttcagcaatggacaaatctttgagacaggaagtcaacaagagaacattagacttaatctgtactatcaaccagatagatctaacagatatttacagaatatttcatccaagagctacagaatacacattgttttccttggcacatgtatcactctcaaggacagcccatatgttacgtaacaaaacaagtctgaaaacactcaaaaattgaaataatatcaagcatcttctctgactacaatggaataaaacttgaaattaataatgagaggaattttggaaactatacaaacacatgggaattaaacaatatgacccatgggatcactgaaagaattcaaaagaaggaagaattcaaaagagggaagtttatagatataagtggctatgtctaaaaagaaaaaaaacttcaagtgaaaaatctaatgatgcatcttaaaaaactagaaaagcaagaacaaaccaaactaaaattagtagaagaaaagaaataatgaagatcggaacagaaataaatgaaattgaaagaaaaatgcaaagtatgaatgaaacaataagttggttttttggaaagttaaacaaaattgacaaacctttagccagactaagaacaaaagagagaatatccaaataaataaaatcagaaatgataaaagagacattataactcatattgcacgaatttaaaggattattaggggctactatgagcaactatatgtcaataaattggaaaaatctagaagaaatggaaaaattcctagatacatagaaccaagattgaatgaggaaaaaaatccgaaacctgaacagaccaataacaaataacaagatcgatgccacaataaaaatcttcccagtaaagaagaacttgggacccgatggcttcactgctaaaatctaccaaatatttagtgaagaactaatagcaatcctactcaaatgattctgaaagatagaagaggagggattacttccaaactcattctacaaggtctgtattaccctcatacaaaaaccagagaaacacacatcaaaaaagaccacaagccaatatctctgatgaatattgatgcaaaaatccttaacaaattagtagcaaactgaattaaacaatacattaggaaattcattcatcatgacaaagctgtttttatccctgggatgcaaggatggttcaacatatgcaaatcaattatgtgattcaccatatcaacagaacgaaggataaaaaccacatgatcatttcaattgatgctgaaaaagcatttgatataattcgacatcacttcatgataaacaccctaaaaaaactagggatagaaggaacatacctcaacataataaaagccatatatgacagacccacagttagtatcatacttaatggagtaaaactaaaagcctttcctttaatatctgaaacatgacaaggatactcactgccaccgctgttattcaccatagtattagaaatcctagctggagcaatcagacaagagaaaaacataatgggcatctaaactggaaaggaagaagtcaaattatccttgttggcagatgatatgatcttatatttggtaaaacctaaaggctccacaagaactctattagaactgataaattcagtaaagttgcaggatacaaaatcaacatgcaaaaatcagtagcatttctacatgctaacagtgaacaatgtgaaaaagaaaaaataatcacatttacaacagccacacataaaattaaataggaattaaccaaagaagtgcaagagctctataataaaaactataaaacacaataaaagtgattgaagaggacatcaataaatggaataacattccatgttcatggattgaaagaatcaatatcattaaaatgtccgtactatccaaaggcatctacagattcaatgcaatccctatcaaaataccaatgacattcttcaaagaaatagaaaaaatcctaaaatatatgtggaaccacaaaagatccagaatagccaaagctatcctaagcagaaagaacaaaactataggaatcacattacttgacttcaaattattctacagaggtatagtaaacaaaacaacatggtactggcataaaaacagacacatagaccaatggaagagaacagaaaatctagaaacaaatccacacacctacagtgaactcatttgtgacaaaggtgctaagaacatacactggggaaaaaaactgtgtcttcaataaatggtaccggtgaaactggacatccaaatgcggaagaatgaaactagattcctatctttcaccatatacagaagtcaaatcaaaatggattagagacaaaactcaaactatgaaactactacaagaaaataaatattggggaaaatctccaggacattgttctggtcaaacaattcttgagcaataccccataagcacaggttaccaaagcaaaaatggacaaatgggatcacatcaagttcaaaagcttctatacagcaaaggatacaatcaagaaagtgaagagacaatccatggaatgggagaaaatatctacaaactacccctctgacaagagattaataaccagaatatacttgtcccagttaaaatggcttacatccaaaagataagtaataacaaacgctggtgaggatgtcaacaaaagagaacccttgtaaactgttggtgggaatgtaaattagtacaaccactaaggagaatagtttagagatgcctcaaaaaaactaaaaattaagctaccatatgatccagcaatcttactggttggtatacatccaaaagaaaggaaatcagtatattgaagagatagctgcactgttgtgtttgttgtggcactgtttataatagctaagatttggaaggaactgaagtgttcatcaacagatgaatggatacagaaaacgtggtacatgtacacaatggaatactattcagccataaaaaagaatgagatccagtcatttgcaacaacgtgtatggaactggagatcattatattaggtgaaataagccaggaacagaaagacaaacatcgcatgttttcacttatttgtcggatctaaaaatcaaaacaattgaactcatggacatagagagtagaagaatgattatcagaggctgggaagggtatcagggcattgggagggtggggatggttaacatgggtacaaaagaaaatagaaagaataaataacatctactatttgatagctcaacagaaggactatagtcaataacttaattgcacatttaaaaataacctgaagagtgtaactggattgtttataactcaaagaataaatgcttcaggaaatagatacctcattctccatgacgtttttatttcacattgcatgcctgtatcaaaacactgcatgtaaccataaatattgatatatatatacctactatgtacccagaaaaattaaaaaaaataaataaaatcaaaggttaaaaaaagatcaataatcaggtcttttgccatgtaggtaatagtcacaggttctgagtattagggcatgacatgttttttctaagagccgccatacaacccactatagatggggaactggggaagatagcagagactgcaaaaatgtccaaaaacattgcacacatcacaggatcccagttctgggaaacctggggaggcttatacaatttcaacaaatgaattcaatgggcaagacaaggatgtggccaccaacaccagggcaccaatgtgactggctctggaggagaaggtttgagcggctccagcataggagtcctacccacatcctatttacgagggccagaggagccccacagaaataggaggacacagagtgatgggtttttaagtgtctcagcaatgggtgttagatcaccttgacttctaggtaataagccaaatgcaggtgaaaccgatattactgacaaatacatttgataatctattacaaacttcaatagttggccatgggaggtaatattttaggtgatgatatattgtagaacaaatcaagataacttctagtttagtttagctagtaaactggaagtaaagatttattttaagtcatttgcaaacaaccatcagcacatccatgcagcttaaatttccttttaggatcagagtctttgatcttgaatttggagcaatagcccagaggccttaagatctttcacaactaaatgccactacaattgctgcacactctatcatctggcaaggtttggcctaacctaggagatcaaagaccatgagattaggaacacattatcctacagcctgtacataaacacactaaacttttgagattataatgctatgacataaaccaacagcccctccaggaccaggtctggcccatgtagtgctaaagccccagaacttctggctctagccccagaacttctgattctgactcaacaagcactccctaagcaattctgctgtaggtggcccaggaaccacactccggaaaacactaccctaagagagatgggcattagaaaattaaaagaattattttaacatatctatgcataacagggcagtattacatattaatgaaccataaagtgaagctgttgatcatatacatgagctcaaagattttaaaaatattttaaacatatccttcatttggaagatcaatgttttgatattactttctccaaacactgattttatatcctgtatcacctttactcagaattaacatcctaaacatttacagagggaagtatttaaactcctttattcattcagaagcacatctagcatgccttattaacaggactggaaatggaggaaaatgtgctacaatattcctcaaccttcaacttctatctgataaaaatttatctgctaatctccagcctgtaacttctcctttctcctccaactagactgtctagttcttgcgcttttatattaggttggtgcaaaagtaatcatggtttttgctattaaaagtaatggcgaaaaccacgaatacttttgcagtgacctaatacttctctagtatttcttacatcccacaccatgacgcaattatctgtgaatgtcatctaccacattggactacattttctggaatcagagacatggcattatctgaccttgggcatgtcctcagcacactgctataaacaaggttggtataaaataaaagtttattgaattcaatggaaaatatgtatgctctttttaattccaggataattacataattcattatataggtatacagttatattttaaaaatctatttacatcaaccagtgtggttctgataaaaaactgttttcaaaaatgagaggaaaaataataatgtatccaacatattgcaaacttttgaaagaataatgaaggttaaggtagaagggcatcttatctcaggcatctaggcataactagacagcaataagaatgagttactttacaaaagggaattgatttagatatatttgaaacgggaggttgtgcagagttgggctggtctatatttcagacatgcaatacaggcagcattattgcttgcatgcaatttctcttctttctccaggtcatgcaaaattaattaaaagttattgaattttctcctggataatttctgggctgttcattcgaatttggagtagaaagaggttcggaatggcctgagcgcaaatgacaaatgttagcttatgcagaagcaacatcctaagaatagtgatgattttgtaaaatacccaaaaggagttttgcatacttcggaagttttgcacatttaatggactacaaatgtgtattccacatggggtgacagtgaatttttgaactggagatgctctttgcctctctctgatatgctttggaagtaaagctgggaaaagaaaaggaaaactctgttaaagtataaggagtgctgaggactcagtatagcatctctttcacatacttgacctggaagtgaaaaataagcatgtcttctctctacaggaaatcacaaagccagacactataatgaacaaggactgaatgactacttcagttagaattctgatgatgttaatgtcaataggaggaatttcacaagtagttttcatttgttgcacgaattttgagaatattcatatcagaaaattgatttcctattacctatacagattcaaaagacagatactttgaatgatatatttatacaagagaaatatgtaaaaatatttgcatatagcattgatgtggtcattagtccaaggtatatgaattggaattttctttcttatctgagatgaggtttaacagttcaatttcacaaaaggttgccttgcttcgtctgccaaatgaactcctaaaaaattatacgagatgaaatacacacctcaggaaagaatcatcttgattaaacatttgaccaatgtactcaacagtgaacatacacaaggtcctttgttctatattgattaaaagtgcaaacattgactttctaacacctttagccacacaagtaaaaaggaaagaaacaatgtacattttttgtaaaataaaggaggatgcttaaattttgttagaattatttttttctatcaaaaattctcaaatagcattatgcctagtataatttaaattctgtcaatgacaaacacaccaaagaataccatattgctgctatgtgagaatgctatcttgaatagcatatcattgatttgtcctatttttatgacatacttgatgatttgattaatcatctgaggattaaatatcatcaatttttattatgcatggatttgactgagtttttataatagaagacaagtttttattacagaagaaaatcatacaacttaactttatgctaagctgtttttccaccaatttccaagtttctatatatattcaacagcttaaacacagtgaaatggcaaggtatagaaagcacccagtccaaagtctggcaagtggagtgggcattcagtacttccttggtgcctcactgagtagcactgagtagatactggtaaataatgaaaattatgtagcctgggtgggaggatgtatgcagccagccaggatttcttttctagcctacatgttaattggtttgagatgtacttccaaaagaaaggtgagcagacagtaaaacaatttctacatgaagccaaagaatttgtttgtgaaaaatgaatagaattgttatttaaaatatctatgataggtaattgtatctgacaaacttaaacctcttttaaaattgctctatattaacatgccaaaatttgtattcataatagaaatagctactctataaactgatctagatgttgtttgtgtgtatgcacacacacgtgtgctttctaaatttctcataattaaggactaatattaattaagaattagatgaccttactgattcagccatgtttggacaacttgtcattggcattatttaatttaacccccactaaatagaggagtaaaaatcagccatttctttaaaggtggtcttttctctctatttcatcttgtgtcattgctcttttgtattggagaaaccctagattgtacacagatataaataattttatatgattatcaaatatgtcaaaaaattctgaagaatttcatctgatagttgcaaggttatttttttcaatgacctcaaattaaggtcctgagaggaccaagacctgggatttgcttccacattaaccacacagaaagacctgccttccagtgggtggggcttcccacttgaagtccacctggtttggacaaagaattctagagaaccctgacaatgctcctgttgggttcaacattttatgccacaaattattctgtgaaaaagagcagttttctatagaactaatgtaactctaggcagaaatatagatttagaagagtttaaaaatacccaagttaattcagtgccaagtacttatactcctgtttgcccatcccataatcacactctcccttctttataaattaataaattatgcatagggtcaaacatgttcttgaacttctctagtacttacagactaaaaagtacaattaaacagaaataaaatttgcctgaacgtattctttaattcaggggtttccaatctttggcttccttgggccacagtggaagaagaaaaattgtcttggaccacacataaaatacactaacactaatgatagctgatgagctaaaaaaaattgcaaaaaaaactcattatgttttaagaaagcttacaaatttgtactgggccatattcaaaaccatcctgggtcacatgcagcccaagggccacaggttagacaagcttgctctaattgtttcataagagttaacattgaatacctagaaagattaactcctttaagcttctcacaggatgcctagctcagactaagtacgtaataaatgcttgttccttgcttttccccatccgtcatgagggcagagactttgtttcatactttattctcttattgaactccctgcactgtttccagttcaatgctgatcacacagcttggaattctgtaatagtttttttttttttttgattgactaaaagatagactgattcagtgatactgatagtacagcagtatgcttaaaataataaaggtgtagttcctcacaaatggaatattaaatctcattaaggattcagatgctacagaaggaagagcccaaaaacagacccacatacatctgaaaacttgatatgtgatgtaattggcattgcagaccaataggaaaaagataggctgcccagtaaatggggctggtaaattgtttattcacaaatatataaaaagttcaatgcttacagtacaggatatttttatgaatctaaggttgtaaatattccttaagcagaatcgcagaagtacaaatagcaaaggaaaagtctgataaacacaactgcattaaaataaaatattctgttcatcgaaagacgcaaataaaaacatcaaaaatgcaagacacaaagtgaaagaagatagttgcaatgcatataaccaaaaaaggactggtatcccatacatcaataagaacccaacaaacaatccaaggaaaatataagaaaaacacatgaacgggcacctcaaagaagaggtactttaaataaagggcccataaacatgtaataagatggtcagctccatttaatgtgtaaattctaataaaaaccacaatgatatcatgtcacaaacaatagatggaccaaaaaaaattaagtctggcaaaatcaaaacttggcaggatgtggcactctgggaatgtttaagcaatcctagtaggagtataaatcggtgcaaccattctggagagaaatttaataagacctagtaaagttgaaaatgagccaacaacccagcaatttcactcctacttatttatatgtccctggagaagctcttacacatgcgcttaaggagacatgaccaagacagttcttcggaccaggcatgttggcacatgcctgtaatctaatcccagcactttgggaggccgaggtaggaagatcacttgagcacaggaacaaaatgtcaccccatctctacaaaaaatggaaaagttagctgagtgtgttggtgtacatctgtagtaccacctacttgagaggctgaggcaggaggattgcctgagcccatgagttccaggctgaagtgagctaagaaggcaccactacacccagcctgggaaacaaagcaaggctctgtagaaagaagaaaaaaaaaagaaagaaaagaaaaaaaaagaggagagataagaaaagagaaaatgagaaaagaaagatcttagcagcactgtttgtaagagccacaaagaaatgataaacaactgaagattattcacatgatggaacaatgcacagcacagaaaaaatgtgctatctccataaacttcacacacagggtccagccagaaagagaggaacagaggaatacatacagtatgttatcagtttatgatgttttataaatgaaaaacaatactatgtatagacttgagacccatgaaaatgttaaaaagtatatatatctatatctatctatatatatatacataattaagagagactgaatttaagattagattaactctgagactgaaaggaggaaaatcagatcaaagagaaacatgaaggtggccatatttctatttgtaatattccatttcttaatctagatgttgcgaagacaagggttctttccattagtcttcttttatttataggggatgcattccaaggtgcccaggggatgcctgaaatagtgaatagtatgagaccctctgtatgctaagttttttctacatacacttatttttgtgataaagtttaacttacaaataaggcacagtaagagattaacaataattaataataaactagaaccattataacattctgtaataaaagttatgtgactgtagtctctctctcaaaatatcttattgcactggactcacccttcttcttgtgatgatgtgagatgacaaaatgcatttgcgatgagatgaagagaggtgaatgacacagccgttgtgatgtagtgttaggccactatcaaccttgaacacaagcactgaaatactggatgccatgacagttgatttgataagcacgtggctatgcaatgactaacaggtgggtagcgtctacagtgtagatatgctggacaaagggatgattcacatctcaggctggacggagcaggttggtgagaaatctcatcaagctcctcagaagagtgccatttaaaactgatgagttgtttacttctaaatttttccatttaatatttttggaccatggttgtctgtgggtagttggaatcttggaaagtgaaactacagataaggaggcatggctgtatatttagtcttcatacaacatgcacagaaatatttaatttttcaaaatttctgcattccaaaaactcaaatatattttagttttgcttaactgaaaattctaaaatagttttaaattcttgaaacaaatagctcaaaaggagagtccctccaattcagatttttattgttatttattatttatttattttgagacagagtctccctctgtccccaggctggagtggagtggtgtgatcatggctcactacaccctcgacctctccagctcaagtgatcctccgaccttagccttccaagtagctgggactacaggcaagtgccaccatgcctggttaattttttaattttttatagagacagtacctctctatgttgcccaggttggtctcaaaatcctgggctcatgcaattctctcacctcggcatcccaaagtgctgggattacatgcatgagccactgcacttggcccagatgaagtttcatatttcactaaagagaaactacctagcttctaagaaatcattgaaaaaccatataaggcaataggcaaagcattgccaattacgtagatgattttagaaaaagaaaaaaggaatgtctagaaaggaaaagattagcataagggttcttcagaagggaagaaacataaggggtcgagagaacaggttgcaattttcgttggagttagtgtatccagacatccttgaacctgcctttcctgtcgttggttctatctccacaatccaagtaaattggcaggttggcttatcaaaacaatgcatacaaaaaatatttcagagtgatttgcccttgtttccttctttgatcacagaaacccacttaaagagcactattccacacataccttagtaaattcaatgacatttttttctggctgcttcagctgccatgatgattgcaaactgtacactgccctcaccacgcagactacttttcatgcctgctatgtgaacacaaagctttgttttttttccagtcccaagtcccttattcaggaccaaattacaaacaatgctgtgttagacacttttcagaaacctctggataaacgagtctcagcagccccctgggctcgaccccacagaatgtaatgcctgctcatgcccaaaccactgcttccttgtgagctttgaatagtcattaacgttgccaagactggcaatcatccttaaaagtcttcctatgaagggaatctaatttgtatatgtctgaaaaagacaatgaaagaaaacatgctggactatgaactctcaaggtatttgttcctctggctaactgaaatgagaaacttttgaaaatatatgctatcattttttgaaaataatgattgtgactttaaacctgaaaagcctcatctgtcccacctcctcctaattgcctggatgataatgatgtaaatgcagttataattacaaagaacttcaattcaatttaattttaattgtttaaaatttgtaaacactccagaaaaacctcattaagctggctgaactagcttgttttcaagagggaacagggagtcaacattcacagttattcatattacaacatccattcacttacactaaccattctgattaaccagtaatcacacacatttggagcaagcagcactggcaaagcttgttacagcttttaaaaaatgctttgcaaggttgcatatataaaatgaagccccacattcaaaagcagaactttggcatgcatgcacattgaagaagggagaggaaaatcctcacaaaatgcatgcatcaaaaagtttatacttctaaaactgaggtcttagaatcccgaaagattcaggttcatgtctccttttagtatgagatgatgtggtctgcataccttccacagtgtctcactgtggtgtgagtttcacagtcaaaggaggacggcctaagtcctttgcacaaagtacatctttataaccaattgccctgtaagcgtagcagtgaaaagagcactggattggactgggggaacctggcacataaaattcactacttgtgggaactggggtacatgttctagcctctctaaattggttttcttagtaagataagccaaacctgaagagctactgcacagagttttggggacaattaaatgtgcctggcatatagaaggtatgcagtatatgtagttcatagtatccaaaaggctgaaacaaaaagggttcacctttggttaccttctgcataattactaacattctagtgattgatgattgaatatattttagctgaaatcttaagttttcagaactcatcaccaatggtttataatggatacttgtttgtatcatgtgaaggccatatgtggataatttttagaattaacaaaatgttgtcttatgtcacaattctctgaactgtatgagggtttattggacaaattaaaattcaatctagtaatataccactcatattgtcacattttaccagacatgttttcctctgttattgaaattttagcacttcctgcagatatttggaatagaaatagaataacgacaattgttattactactcatttttacaaagggcttttcaatttctaagatgattttaatatacattgttttggcttgtccctatagcttgcagatttggtcccaacactcacagtgactaacaatgttcagagcagtgtaatcattggataaaagcagcagaggcctaagggcaggggtcagactttgaacccttgctttctggtctcaaatctcatgctcttttctggatgttgaattctcccataaacacactacgatcaaccagaactccacttccattcatttataagagttaaaaaagtgaagcctccattatcatctgaagtgtaaagagacatcagatttcaaaatgatggcaacagggaagagcccttgccaaactaactattattttaacaactaaatgactgtgtaatcactgtacttgctgcaaaaacactgaattgaggtttccatttgggtgtttgtatgttctcaagtccagcaaacagagctctgaagaatgtgagcacaggctgcctgggcacggtggctcacacctgtaatcccaacactttgggaagcctaggcgggtggatcccgaggtcaggagattgagagcatcctggctaacacagtgaaaccccgtctctactaaaatacaaaaaaattagccaggcgtggtggcaggcgcctgtagtcacagctacttaggaggctgaggcaggagaatggtgtgaacctggaaggcagagcttgcggtgagccgagatcacaccaatgcactcaagcctgggcgacagagtgagactctgtctcaaaaaaaaaaaaaaaaaaaaaaagaatgggcacacaggcaagtttttcacagtacacctaagcagtcagtgatcatggggtataagtggtagaaaatactaactggtttatttcatttcccttaggaacaaattcatacagtgtaacccagccaagagattcccagagattctcatcctgctcatctccgtcaccaagacgtgtgcttgtgactccagtgctccagcatgcgattgtcactcaacctaaatcccaggtcatctttcaaaatctgagccaaggaagccttaccatgaacactgaacatcaaccatgcctaattccctggcctagtgctagagccaaaaggtgtatgaacctggttccaagaagttccaaaggaatggggacaaaggagacattcataaatacataactgtcagtttggcccactgtgctaaggcacaataagaaaagtgagataatacatccttttgagtggaagggaggtggtcatcacctaccatgctggcctttcccttttctaaccacccattgttcttcctggtaatacaatttagcacctgctgggtttcttacaactcctcccatgttctttctatatctgtagtcaaagtgtaagccacttgaggatacagatgtgtgtcattcttctccaggattccccaaaacacttggcatagtcttagttacaaaaccagggctccatagagacatattaactgactgtgtatagaagattcagtgggtgggaaggggaaaagactaaaaacaaaaaaaaaatgggggagaaaacaaccctgttggaaaaggaatgactaggaatggtatcttggtgagggaaaaagagatggttttatgttaggggagtttatttaggtaggaaaaaaaatgagtaaactttgcacgatttgaaatctgcattccactggctaatataaagtaatctttcctgtttgtaaaatgaaaaccatgaaaagatgataacacactttgtactaaatctacttggggaaggaacaacaacattttctccctttgctcagttcagcctggaatataatagatgaaattgtaattcagagcacattatcaatgctgctatttattttctgaaacattagtctaggtatatttttctacatttttatatcaaaatatgccccttaagattcagacatacattctcaagggagctggtctacaccagttttgtaaaatgttgactaactatttgagtgatgaactgaataaaaggtcacttactttcttcatttatcacccaacagcctttgatggttgaaaatatttgttaacctttctttgtctcgattttatcaccaaaaagaaagagggataaaagtgcttgctttgaagtatatgcgcgactgaacgcatgtgtgaaattctttgagattctcagatggaagtgctgttggaatcattaaaatttagagaactttaggaatttgaatcctttaatactctgaaggtaaagtaatcagattaatggattttttttcttaatcttgtcaagagtatgggttgttcaagatcagatgtttttcacttctctactgaagaaaactgacttgaggcttggagtagagaaataaaagccaacttcctaattattccctctgtgtggtcctcagagactactgctgatctggggttaaacttattctttaactaattaaactctttttctttaattaagcagccctaacgaccttactttgtagacagctggcttcattacaagcagagtaactttcttatactgaacacaaagtaggtgaggaataaccaaaaaggtcttagaaaattacttttaccagaaattatttttcatctcattttgccagatgaaacatttagttaaagggttgctattgagcaacatgaaaggaacgtgggctggaacagtcccaagattcacttggtcaaaattaaagcaggtgctgggctccacaagtcctgggtaccacggaaggcaggcggtttgctagcattcacaggatgccgaacccaggcctgcaacgagttttcatgctgagcacctcaaagcaccaacagagacaggatatgtggattaaagcccatgaaaaaataaccaataatttattttccaatgcactgtgaatatttaaaagaataaaatcatctgctatgcctaaggtgatttatgttttaagatattcaaatatatctcccataagttactatcaaaaatgtttaagcatgggttctagaaaatggtaggctctcaatacatatatgtagaatgcttcatagatgaaaatggttaaaagataacttattgatctgattcaataccctccatttgtagatgagagaagtgaggtctagagagattaaatgaaatctccaagctgacacatgtatttttttcaataaacctttactgacagcctacagagtaccaagaatcatactaaaactgggactacaatgatgaacaaactgcactttctctgtgcctactagctacctctcctagaatatttgtaacaaaacatttgtcattggttgtcattggcagtacaagttaaatttcttggtttacaagttagagcttcagaaaaccttgcttttacttttcatcaatgacaaaataaacacaccattaatccaaatccacctctgtgccatctacagtagccaaattaggaaaccacggactatcatcacgtaacagaactcatactctgatctggagctagtccgcagctaccaagacattctgacaccaaagctgatagtgggcaatgaatgcagggataaagggttggttttctacctttctagagaagtatattaaggtggaggcaggagatgggcaaagagtatgaaaactggagagtttgggccgggcacggtggctcacgcctgtaattccagctctttgggaggccaaggcaggcagatcacctgaggtcaggagtttgagaccagcctggccaaaatggcgaaaactcatctctactaaaagtacaaaaattagttgggtgtggtggtgggcacctgtaatcccagatacccaagagactcaggcaggagaatcgcttgaacccgggaggcagaggttgcagtgagatgagattgtgccactgcactccagcctgggcgacaaaagagaaactctgtcacaaaaaaaaaaaaaaggaaagttcgatgtaaaaaacaagtatatttaatctcagtatgaaaaaggtctcttttcttccttgaattgataaacaattgtttatcaacaatagaatatttgttcaactaatgtagaacattcaacaaatagaataattacattaaagtagtctcttttgaagggtaaaagaaaattctaagaaagcagtaattaaacagaatggtagggagaaaacaaaataaaaaaatactcctaatgttttggcatcctccttgggatggcatgagagggggagataaaaaacatagaaaagtgggaggaaaaaaagcacagtctggaggtatattttagttcccaattgcctgagctataacattcagagtgataaaaccaagtacctgctgcccctcctgcccttcatttggttagctggtaaaccattcttcacagctttttgtctgctcagatccttgaagattctttattcgagagcagtcaggtctaacaaccattcctccaatagctttagttttcatgattagaataacactgtccagaaagaaagatgctgtctcctggaggagggatttgactcctggctggaagtttgccatctctggtcttgttttatccaagatcctcaagaaaatcaaagtctttggtctagtggtaaatggtaactagcattccagggacgtgcttgctatctacttgcgaactatcctaatcacaactctacttccagactctttattttacaattaaatgcttccttctgaaatatagcttggctaaagaaatgcaattttaattgtatgactttgtaaagcgaccttcaaaaattcaaaggttaactttctttactttctgaatcctactgtgccatgcatggccatgcaaatcagcactagtctaatctgtttcccttaccattgctactctctttcgctaatttccactttattttttcaagtccaagttgcttacagggtaagatttcaaagcaagctccggttcctggtgtctctgcataactttggttttagttactaaggaaacacttctttgctgtgctacactgtaaatcctttaattctcccttttcctaattcttaagtaatccatttaaactgcaaaagcaaatactatgagagcatttcataaaacacactgcatgcaatccaataaacaagaaatcatatataatttaacttcaaaatttcatattaattgccattagaaattcaaattcaagtactgtatgcagggtaaatagatgaatagatgcagtgtatgatggatgaagccagcccatgttccataattctatggtgtttatcagtatcaaggaagatggcaaaggcaagtcagaggctggtacaaaatttaaggctaaaagtatctaagcttgcaagaaaaagcaggcgatatctaattatacactaattctaaaatgctttgttccaaagtgtttacccagaaactcaattattccttccacaaacattgatggagatcacaccttgtttaataaagtattagcaatatgatggtatgttacctccccaccccagtagggagagaacctgtacagaaataaccatagaacaaagccaaatatgctaaggactaaagaaaggcacaacgttctatgagagatctatcagagaggggtttactgctggctgaggtgttagagaagctctaatgtagagacaaacattcctgctgggccctgttagcactgcaacatgccaagagggagcctgggagaagaacatgcattccaaggaaccgtgtgagcacttggtttgcctctgagtgtttttaaagaatgtcaagctggctaatgtcctaggggaggtagatggagtgaagtcacaactaggccaaggaatttgagttctgaaattaatctactggtgacgaagagaatttaaagagcttttagtggggttagaaatactaaaaagtgcaaagaggaaattcagaactagaaagtaaagtatcctcacatggtagaatgacatatgcccactcttatcaaatccagtttgaaattttcttggcaatcagatgtccagggggccaccgtggttcattgttcaggaaaatcacgagtcatatgctgacatttattagagttttgacctataagcaggtaggcactattgctccatcaaacaaaatgaaaaccctgatgaaaagtggctacaaaacagcctagcaaaaatctcaaatttacacatatctgtataaggcctcacagttgtctattgatataactcttgaaagtctattttgaacattctgcattttcttgactcaaccattataattcagaaaattaaatggggagaaaggagtgagtagtggtggtatcacaaaggaacaaactagagaaaggtgttgttctctaagagtcttgagttgatactaaaattagggcgtatactagtatactgatccaagagtcaagggagaactgtagtccaatcagccaaaaaggaaatctgagtgaatcatccaaaaaacaaaaaaagaatagaaaacaggtatcaaaagtgatacaccgagccaagaattagggttcctggaagagaagtaggaaggagctgagaacagagagtgagttctagttttaaataacaatctgaagcagttcatttttatcttaaagtatggaatcaaataggtcagccaccttgaaaacgccagaagatggtgtgctgcgagatatcagtttagataaactgtatatatatatatatatagtttatatatatatgaatagtttatatatatatgaaagaactaataccaggaaagaataaataagctattttatatagatttcaacaaaaattattaatgtcaaaataaagcaatataacaatatagacataatgggtatagccaatttaagctctgaaatgcacacacagaggatgaaatgagaatgttgggcatcatttgttgcattatttgatctatctactagttattttgtctccacatctcattataatagccagatgcagagctgtaggaaaacatgactcccagcaatggcacctgtccttttggtgagtaattcaaaaataaaactggtctttttggagagatctctgaattttccatctggccaggctgctcctgagctttgcctgccttgcttagagggtgtttattttatcatgagctttaattatgggaacaataaatgctttcttcttaaaattacttacaagagttattaaaagaatattacaagagagggagaggcacacacttatccctgtgccaatgtttccatctgtccctcctctccctactttcctcaacattaacttgtaggtcaggcaggaaagttatatgattgaatattccgtctgatgtggattattttgtctgtaccactttctcgatgacctgctcaactgaaatgcttgtttcttttatgcctatccagaacatctctgtcccctagtgtccaggtcaactctggattctgcctgaaaactttccccaaagctgtatcctcttcctaaattccaacattcatcatccctattttaacaatttacctttccttataatccaacatattattagtttcaaatgatcttattatatagttccatatttttctattgctctccactgcacccagaatggtatataatagttatttaataatatttactaataaattgtaaaatttcttctttaaaacattaagagtcaagtttttaaaatgctgatttgcttctcttactgcaaaatcttaaagtgtctgtcttcactaattttcattttcagaggagacctgtgccaattacacatgaaatgctaaataaagctagatgcaggactgtgctaaatacgaccaggatagttaaaggctacatgggcttcttttattctttaaaccaacaagtatttattaaacacatattatcaatgacaagcaggaaatcttttccttggatttttaagttacaagtactatatgggagtgcacatttgataccgtcataacttttttgaagacagatcattcaggcaattttgtttgaaaatttttgtcaattacacttagatctgtagctccaaagttgaagcacgcaaccatgccctgttttagtgtacatcattttattgtgctttgcagatttttttttaaacaaatcaatggtttgtggcaactgcattgataaagtgtagtagcactatttttccaacagcatgtactcacttcattgctctgtcacattttggtcattcgtgcaatatttcaaactttttcatttttagtacatctgctatggttaactgtgatcagtgatctttgatgtgactattgtcattattttggaacaccacaaatcgtgcccatataagacagctaatttaatcaataaacgtgtgttctgactgctccaccaattggtcatttccctgattcccctatctctctctcctcaggcctcccaattaattgagacataatattaaaataaggtcaattaataaccctacaatagcctctaggtcttcaagtgaaatgaagagtcacaggtctctcactttaaatcaaaagctagaaataattaatcttagtgaggaaggcctgttgaaagccaagacaggccgaaagctaggcctcttgcaccaaacaggtagccaagttgtgaatgcaaaggaaaaacacttgaaggaaattagaagtactacttcagtgaacacatgaatggtaaggaagcagaacagccttactgctgatatggagaaagtctgagtggtctgtatagaggacaaagcagctacaatatccccttaagccaaagcctagcctgcagcaagaccttaactctcttcaattctatgaagcctgagagaggtgaagaagttgcagaagaaaagtttgaagctggcatagagtagttcatgaggtttaaggaaagatgccaataccataacacgaaaatgcaaggtgaagcaccaagtgctttaggtgcttttatatgaaaaactacagcaagttattcagaagatgtagctcaaataacagataaagatgactacactaaacaatagatttttgatataaatgctgatagaagatgccagccaggactttcatagctagagaggtgaagtcaaagcctggctttaacggctcaaaggacaggctgactgccttgttagagactaacgcaatgtgactttaggttaaagccagtgctcatttaccattctgaaaatcacagggcctttaagaattaagctaaatctactctgcctctggctctatagatggaacaacaaagcctggataatggcacatctgtttccatcaaggcttagtaaatgttttaaacccagtgttgagacctactgcttagaaaaaaaaaaattcctttcaaaatatcactgctcactgacaatgtactaggtcacccaagagccctgatggagatgtacaaggtgatttaaattgttttcacacctgttaatacaacatccattctgtagcccatggatcagagttatctcaactctcaggccttattatttaagaaatattttttataaggctatagctgccacagatagtgattcctctgatccatctgagaaaagtaaattgaaaaccttctggaaaggattaccattcttcatgccatgaagaacatttgtgattcatggaatgaggtcaaaatattcaacattaacaggagtttggaagaagtttattccaaccctcatgaatgactttgaggggtacaaaccttcagtggtataagtaactacagatgcggtggaaatagcaagaaacctagaagtgaagcctgaagatgtgactgaattgctgcaatctcatgataaaacataaacagataagttacttcttatggatgaaaaaagaaagtagcttcttgggatggaatatactactgtgaagatactatgtagattgttgaaaagataacaagagattagaaatattacataaacttagttgataaagcagcagcagattttgagaggactgactccaattttgaaaaatgttctattgtcctgtggataaaatgctatcaaacagccttgcttgctatagagaaatattttataaaaggaagagtcaactgatatagcaaacttcattgatgaatttattgaattatactaaataatttaaccttgctcaagtttcagcaaccaccaacctgatcaatcagcagccatcaacactgagacaagactctccaccagtaaaaatattctgatatgcagccaggggtggtggctcaagcctgtaatcccagcactttgggaggctgaggcgggcagatcacgaggtcaggaaatcgagaccatcctggctaacacggtgaaaccctgtctctactaaaaatacaaaaaaattagctgggagtggtggtgggcacctgtagtcccagctactcaggaggctgaggcaggagaatggcatgaacccaggaaggggagcttgcagtgagccgagatcgcgccactgcactccagcctgggcgacagagcgagactccatctcaaaaaaaatatgtatatattctgatatgctaaaggcccagatgattgttagcattttttagcaataaaatattttgaaattaaagtatgtatggtgggccattacagtggctcattcctgtgatcccagcactttgggaggctgaggtgggcaaatcacttgagcccaggagcttgacaccagcctgagggtgggaccctatctctacaaaaaaattacaaaaattaacaaggcctggtggcacatgcctgtggtcccagctactcaggaggctttggtgagaggatcgcttaagcccaggaggttgaggatgcagtaagctgcaatcatgccattgccactcgagcctgagtgacagagtgagatgctatttcaaaaaaaaaaaagaaagaaaagaaaaagaaaaaaaaggtacgtacatttttaaaagacataatgctattgcacatttaatagactatagtatagtgtgaacctaacttttatatgcatggagaaatgaaaaaattcacattacttggtttactatgatatacactttattgaggtagtctggaacagaacctgcaatatctccaaggtatgtctgcatcagaaatgactgttttactttgaccaaattacaatttctccagaaaaaaaaaaatgagggaggaaagagaaagttccctcaccaacaaaatcagctgaattaacctggtgactaacatgatgacagatattgcagccagagagccctaagctcccaggacaaacaatgggatgccaagcttaagataaccccaagtaaatgcataagaatatacattcattctttctaagacatcagtgggactaggaaaatcatctcaagagctgaactttaaagctattttagacagacacatttaatagcatatttttttaaatcttgtgtatgtcatgacaagttcttttctttcataactctaaatatcacatacaaaagtagcaggtgtgaaatgtgttttgggtaagaaaaatatcaagcttctatgaaagacccttttgggaaaagtcccatactaaaagagtcctagagaatatacccatcatgacacatctcttcaaagctaaaaaacagcttacacaaaatcccagatatcaacaagtataaacactatgaaagaaaaaagtattcaatgtcaatatattttatagctgcatgtttatgtatatattttcatggactagattgatcaaaatataagaggctgtctctctcccgttttctagccgtccctgaaatccacttcactgccaactctaatccttgccccctttttatttaaatgccatcaagaatctgaagtagtaaaattgaatggagatttcaacggtgggccaattttcctttcttatgagctatgaagataaatgtacacacacgagtaaagaatataagctttgcccaagaggtacactgggcagaataaagaaacgtctttcttttcttagaagggaagtgaagatttatgaggaggcagcatattgggcagccttctgaatatcttataatttttttgtgacatgctcttcccctagtgggcttcatcattcaggctgctctcctcccctcactgatcagagcttataggccttctgatgaatccatcctctacaagctatggggacggcctgcattcttgcctacgaagctgcagctaaatagaaaaagcacatccagaatgaccactaaaaagagaaaaagcaaaagcagtttccagatccatgaatcccaaaatattaaaaaaaaaacaaaacaacaacaacaaaaaaacctatttatatattaaaaatttgcttcattactagactgtagagaaatttgattttacattggattcaattcaagttccaatgcatttggacaaagaatttagagtattacataaacttagttgataaagcagtggcagggtttgaggactgcaattttgaaagaagttctactgtaggcaaaatgctgtcaaacagtattgcttgctgcagagaaatatgccattgacagggcccccacgctaggcaccgtactataggcatttgtaaatattatctcatttaatcctcaaaactcgcattctagaagaagtttttttctgcatttcacctgggtgatgaaataacatgtacaataaacccctatgacatgtgtttacctatgtaacaaaccttatcatgtaccatcgaacctaaaagttacagaaaacaaaaagaaaactgagattcaaagaagggagtaatcctccacccaagtcacagaaccagatcaagagcacagctaggacttgaacttaggttttaaacattaactgaggcaagaaccagatgaacacattgtctgacggaactgccaaacctcctctttcgatttgttggggaaaataaaaatggaggggagaaaaagaaagatacaatttcagaagagagagacaggtcataatcaatcataagctttcttggagaactgagcctttgccattagtacctggtggctattgggccactatggcttccccaccttagatcaacacacttgagcccctcaccacctcctaaacacctttctccactccccaaccactaggtttcatttaaaactgacagtgcaacatgcccacattttttttggtaagttcaaatgaaaaaaaaatgtatcttaagtcatgcttgctatgcagaatatttttcaaatctcttactatgctttcattttctgaaatttctctgatgatgagtactaaagataaaatgtaaataattctagagatggaacaagccaagtgctatccatagccctagatgtaatgctcctgtaaggaattataatggacatggtaaaacctttaaaacaaattaaatgttcaacttcagcctccatggtaaagacaaaaaagccaaatatttacgcttggaattttgatctctggttaaaaaggaaatatagaacaaacaaacaaaaaccaaaaagttaacgtatcactatatgaggcttggccttgtgtctcctgttagataagagatgaagcaacactctttggcgacatatggtgagtcatttaagtgtattatgcagatttggagtagagatattaaacagcattttcaaaagaataatacaaggactatgactgaagaaccattgacaaaacacaaaagcacagcttgaaatgtgaagactcagcatcatcttaaagaaataaatacttctatattcttcaattgagctactcaatagttgtgagaacaaagaaaatcctggaggtaaaaatccatgcaataattctggctggtcctctttgcagaggtactcaggtgtgtgatctggtagatggcctgctataagtttaatagcagggttatagatttaaaaatatatttaaaagatagttcacatttaattttatttctggtgagattaatgtgttacaaagttagattaattaaaatgctctgggaaataattttcttggtgaatcgatctttataattcatttacttacaatgtttacatagaaatctttataaaaccaaagaagattcagtaaaaagcacccataaattgatttcatgggaaaaaaataacgagattaaattatcagtgtttttctgcctaaattacagcataaggatgtgaatgtattaggcacattgtaattggcccaatcctggctgctcttctcttcctacttcaaagtataaagaaagcactagaagaggcaggcaaaacccagctcccatggaaggcactagctgtacatattatttcagagaagcaaagcaaggttgatgcaatccacacaaaaagagagatctgagtaactccagattaattaatcacagcaggaggaagctgagttgccagaaatgttactaagttgccccctacagaatggatcaagagtgactcccttccttaggaatgaaatggagacatgattccaaacaccacactttggatttataatcaataattctattgtcatatcatttacaataagtgtgtttattaagctggcattgacagggcactcaatttattatctctgaactgtttgaagttacatatacactaccagcatgtatttatatatggcgaatccatctgcagcttctctttttctggtaggaagagttcacacagcttaccaaggagggcctgaccagatcataaatcaaggtgaagcaatttctgataactgaatatgagtttcctctaaagctttttatgtgacgaaaagctgagaagctctgtgactagcacaaagaaaaactcatcacatttttttttcccaataactgctggcctctttgttctagaataatctgtaggcttttcttggcattttaactcacatttgcccttatacccagggaggcctctgcagcttaactttctctctagtcattgctctcttcatatccaatattagctgagcaaagtgagttactaccaacttttgactcttcctggccaagatgttttcagtttgttcaaaagtagaaaaacttaagatatttaactgatatatttgtggggaaaacttgtaacatttgagagctaggaaaaaaccgttaacatctgccatactacagactaaaggaatggagactagaaagatctagtgaaccccttgctccttcaggaactgtccatggtgctgcaaccctccaaaacatcgtttcttagcagttgttgccacacaaatcagacccaacctcagcgactcactagtcaagattgctatttgacttctctcctcacagaggtgctgaggaaaaggagaaaggagaaaattctgacatgatcaaaaaatggtcgaactcacaccatctttgtcttggcatgggttgtcatcaccagctataaaactataaataaaatgtcatcagggaacaaaactgtatataaacaaatttgcaatgttctatcaagttagagtgcaaagcactgcctctcagaaacaacactgattataactggaaggtggatctttaagtatactgatagtttaagtgcagtgtttgtttcattatggtttgtgtaggagaagaaatcttcctaaaagggtctgctaacaatacaaaaatcacatacgtgccagaaagaatgctgaactgaaaacccagttttcctctaagcagataatgccatgttcacatgattatacaactgaaaaaaaaaacagattaagaaaaagtgttaaagagctttcttgtactgcagcaaaagcatttcaaagagaagataaacttacagagctattacaaatgttgtaaaaagcctaaggaagcctggtaaataagaaagttttaaattactgctcatataaaaataaatgttactgtccatcgttgctctgggtggggatacgcttggcataaggaatacttaagacaatggaaagaaaaaaggcagtgactgtgattctaatccaaacaccatattgttcgcaatagacagttaatttgccatctaatctctctctctgagcatagccccttagtaaccacattcatataatttgttttttcatttaaaattccactggaacttaaaagtttattaaagtgaatggactactccatctgagatgtaactgaggatatattagcagaagcaggctccttagcatctgattaaaatctcagtgttctaagcattggaagtaatactttttccaagcagcaacaaactggataaaaattatcagacccatgaacagagtcatttagcctcattctcttgttttaaagtgttgattgcctgtaagttagtagaataatctcctctcctctctagccaccagagtaagcaaaaaggaaacatctcataagtccacagcctgacaacagccatagttctaatggctctttgaataaggaatacttccacattagaaggaaaaacgacgacaactatgattctaaaaatggaaagcacacacacaaaaattaaaagctcaaatggtaaaaacagctgcgcaacagccatttctatagttttcctcttcaataaaaattgttggccaggcatggtggcttatgcctataatcaaaacactttgggaggctgaggcgggcagatcacaaggtcaacagatcaagaccatcctggccaacatggtgaaaccccgtctctactaaaaatacaaaaattatctgggcatggtggcgcgtgcctgtagtcccagctacttgggaggctgaggcaggagaattgcctgaacccgggaggcagaagttgcagtgagcccaaattgggccactgcactccagcctggcgacagagcgagactctatcttaaaaattttttttctctctcattaagttagtttacaccctcagggataaagaagtgtgattcagagaaagggtggcatggttcacactctaccagcaggcaagaggacccctatctcagtgcactatatggtcccaatgactatggccacgtcactgagagatcagcctcctcaaagcggtagtagagtcttgtctggcattttacttgtactctgacaacaatgtgagatcacatatgatataacgaatatttggtagaaaactgttgacaccagtgcaatatatagttcatgtagctattacagtttgattcattctccattcatcttaatgggaactgctaattctattcatcactaatgacacaggttcaagcaaaatctaaggaaggagtgtgtgagtgtatgtgtgaatgtgcatatacttgtgtatacatgctcatgtatgtatgtatttccctcatatgcctcattaagataattacaactgaaggaagcataattgatggctagaaaatttagcaggaataacacaagggaaatctggaggtttagtacatcaatatggtgaaagacaaattaaaggcttaattaccaaactgtagaagctatttaaaaattatgattcatgttagaactcacaattgagccagccttgtcatcatctttctctttgttttcaataagtgttccttgttcttatcatctaaaacccgtcttcttttttacccttcaaatgcttcttacaattctataattaaattcaaatccatcacaaattctctggataagtcagaatcttaagttggattttgccaattcaacttattaaagaataacagcccaagtagagaaattatatgtgtttcaaaatcattcatatctacatgcattctttctctcccttccttcttctattttttcctttccttctctctcacagaagaaaaacattgtaaacatgggatgctgagtgccatatgttccattacacagaataaaagcaaactcgtttcccatacaatgaataggaaatgtacaccccctagcataccaagtcctactttatatttattttggtctcagaaacgttagaatagccagtctgcaaaaatttttgcaatggttatgtgggaaaagtcagtagggaaagtcagtagggaaaaggaaatgttaaaatcaaagctaacttctaccacaagtgacctctccttggtatgatgtagtctagtggcatctatatttcctccagagcgattatctcaatttaggtgcaacagtggaagtttctgttttaaaccatttttgggttagcagttataacattcaagtggtttcttgagactctgagggaatagataacccaaatctgaacaggatggaggaaactcagtgccattttattttttatttttttatttttggtagagacggggtttcaccatgttagccaggatggtctcgatctcctgacttcatgatcctcccgcctcagcctctcaaagtgctgggattacaggcatgagccaccgtgcccggccctgagtgccatttttataggtactgttcaataaggtcttcaggatgcaacatcatcatattgttataagtgttattctgaaatgttgtggtgtctcacataagctccagttctatattttcaaaagcttataagattttccaactaagatattctaatgctacttaaatttatgttttaaaaaagaaaataccatttttcaatctgcctccaagaaaataggcaactaaaattaggaaagggtaaaaggaatccatgatcatgagaatgggaatggatacaattgcttaggttttagagctggcctatgcagtagtcactagaagcacaacacacagtgtggctggcaactctggcttggttcaggagaggctgatgtctgaggaaatccaatatggtggataggaggtccaagcaccaggggatactccaagtcaagtgggaaatgatctactcattcaaaatagactgtcttccagcctctgggaatgtagggaaaagttttagccacagcatagcatgatcagggttaggtaggttgcaaggacctgagaaggcaagctgcattagagaacatcattttggattttgttcattgaggagctgttgcagactgtttccctgggaaacaaactctgagacagagattaacatgcagggaatttattgcaagggatgaggggaatgctcttgaaattaacaatagaattgggtagcaggagctctggatccagaacagctctgcagaagtgtcctcaattgggataatacaaccagaactttattcccctcatgaattatcgattagatataggctgaccctaataagagtcatgaacttggacaagagtgtctcttcacctgatggcaaaacccagagagaggtagctatcttccacccatattcccagcagagaaaggcaaggagtcctgaaggggagaggtctgatggcacatccactctagtagtagatgcatctactacagatgctcataaaataacttagatagaagcttaatgctgatggtggggcttagggcatacctgaacctttgtgggcacacaagtgtccagggctcactcagatgtacaagatcccaaggctctaataccaacaggacagagctgcaaatgtcctcccagcttcccctcagagcaagtctcagaaatggccatgtgaaattacacatcctgtggcctttggatgatcagctgtttcatatggtctgtatttctctagtcaaaagaatagtagtaagatggacatggcctgaatatactggcagagacatgaacaaaggaagcagaaggcaatgggcaacacacttgtgctcaatttcaggacccaaaactacactgagcaaggggctccttctagacattgttccacagagaggctccctgacccctgttcaagctgttagagggactcgacctctgggtctgaaacataaaaaaccaaagtaggaaaagggaaaatcattcactgaggcatcactgaactcctttcaagtcactgctgtctgggtaaggctagaaacagtggccacactgaatctgcaccataacttacggttggctgactttttgctaatttgtctattaccccaagatgtttggaactaacttcttgcattgttaaatatttcagaatatatatagccaggaaagattcattctttagggttcaactaagagatttgtaactagcaaaatgatgaaccatgaatcaagctaaagagccagttagggacaaatataaatgtgaaacaaggcaatcttcaaacattaaaatttcaagtttaaaaccaggaatttatgattctggattatagcttttctttgcttactcaattggataatgaatgtaaactgtgacgttatggtgcaaaactgtaacccaaggagtgagcgatccagtactgacttgagaaaccaatattacactgtgagatattcacggttcaatggagagatggaaaattagatgccttaaggtctttcttccagcctaaatagaaaataacgtacaaatgtaaagcactggaaaataaaatcccttccagcccaaatagaaaataacatatacatgtaaaacactggaaaataaaaattttctgttgttgttattttattatctttctaagcccctttcctaactcttttccttctttgaagtatcttgaactccttttggacactaaatcttctttgtctgttccccagccagagatccctactaaaagagatagcatgctaaactgtaggcaatttacatgttccggactttcccctctcatttttcattccctcaaggacttcctctctgttaggcaattgaaattacaaaaattaggcattaatagccattgttgcttaatgggttacccatccccagtatagacagatgctgaagttttattccccagccttttagttcctatcattgtatcaaataagactagatgacggtatctccgtaaagccttcaatttcctccctggccccattagatgctctgtttgggttaaatgagaacagcttgcaaggtagttgtttgaacacgactgcattaatcagggtagaaaaaaacatgtagctgatttacagaaagcattagattaacaatttagagtaatgtgaggaaaaaacctcagtgccttataattatagataatatttataaatttcattgatttattaaaaatatatatatatacacacacacaaaacattcagattctagtatttgctatccaataggtacctttattttatattccaaaatgaaaatttatggtggaaatttcaactaaagtaggtatttaggcatacttggatagacgaactttgaaaatgccattaatatcacttacatatatggtggtaatcaaaactaaagctgaactaacttggcaaactctggaactgatattcatgtatggagtttgtcaatgagtaggaaaaatgtatcatttcagtgtgagtttatgacttcctttttgtaaaaggtggtatgggaacattgtctccttacttaatgaaaaatagtattagaatacacaagactgtcaggataattacccagtaaggataataactggaaactaaagacaaagagtaaattaaaaaatgggatgatatggctaataagatatgccctgcccaacagcccatcagactcttctcaccccaactcctgacaaattttcacatagctttggttgccaggagcctcaatacctgctccccagaaggtgcctgtgtgtcaatctctctgtactcaagggggcatgcagatgtttcctgtatcatatctctaggatatctaaggaccgactccttagttctcatttcctagggaggtcaagtctcttaccagaatcctttggggctggcaatgttcatcaccccatcctcagccctctaacttcagaggacagctgacttcttaaaggaatgaagagatctttttcaagtcactgctacttgaggcctcagcaaccaagaagttatacactcctcccacccccacaaattcacatacatgcagatagtagggtagactatacaggtgtgtgagtgtgtgtgtatgtgtgtgtgtatcctcctatatagaggcagaagatttcataaaatatatacatgagatatacatacatgattttatgtataaatacatatagtacacgcatataacattttacatatatatctcattttaaaacatcttgcttttgtaaaaattgtgtgagtatccgatcacaggaatacctttctaatcttaataatttagtggtttaaatgtacatgaaaggtcatcctagctcattataattctagaagagtcaatcatatatccatcaattactttggagcaaactaatggaatagttttaagcataataaagacaaaaggtgacactaaagaagcaaaaataagtctgttaatttccaggaagcttcaactatagaccaatcacattcacagggaacaacagaaaagtaaagctgagctgcagaaaaagtctgcactaccagggtaaaatagaaacaggaagattaagaccaagaaaacttacaaaagaatcacagtcagtgaaaccccgtctctactaaaaatacaaaaaattagccgggcgtagtggcgggcgcctgtagtcccagctacttgggaggctgaggcaggagaatggtgtgaacccgggaggcggagcttgcagtgagccgagatcccgccactgcactccagcctgggcgacagagcgagactccgtctcaaaaaacaaaaaacaaacaaacaaaaaaaaatcacagtggccctaacatgccaagattggtggaatctctatagcagaaactgtcagtctttatattattcttgctagtcaaattccactttctaaaagccagagaaaattcatgcagctgggtagtcctacagatttctgagattctctgagtatagagccatgcaggttctcctattctttccgagcgtctatattcctaagtagaaaatagaatttaagcctctttccaacaatcttaaagatacactagttttgaaattcagcaaaaaaatcagtacatttcagggtaccatatgctttgaaagggagaggaaggcagagaattaacatttcccaagagcctactgtaataaagacagaaaggcacattggataaaagcatagactaggagccaacctacctgtttcagatcccacctctgccattcacaagctctgccatagtgtattgagtgtattaaatgaactcataatattgaagagaaaaggaagtactcattatgaattagctgttgtttttgttactctgtgctgggcccattcttacaagatgcatggtctctcctgcctcagatatgtgccatgctgtttcatttatccaggcttttttttttttctttttttgagactgagtttcactcttgttgcccaggctggagtgcaatggcatgatctcggctcactacaacctctgcctcctctgttcaagcaattctcctgcctcagccttcatgagaagctgggattacagctgtgcaccatcacacccagctaattattgtatttttagtagagatggggtttcaccatgttggccaggatggtcttgaactccaggctcttctaactctcctgatcctttccctctctgccctcccttcatttcctccaacatctcaccttttccagggagcactgctgtgcctctccagactggaacaggtgccagccctccaccataacaatatttcactgtgtcctcccactatgtccctgagtgcagacaatttaagagcacccaccccactccccgatcgtctatcttagagccaggtacttacaaggactctatatgtaccaaagtcgtgagttcttcaagagtcccaactgttattttcttaattattgtataacacatgccatttttaattccctggctaacattcagtaagcaactgtgtgccaggactgttctaggaaatgagatacgataccacataaacaatgtctctgcctacatgttgcttatagtttgaaacattccaatcaaaaatttttgcttgtgaacaaaaattaagtatgtttcaaaaattgaaccaagtcacgtttgagaaacattacacatacggtattttaataattattataaaatatgactgtaggaataggaaaggaagcctcaaaacacttatttaaaaacccaccatggctccgaattctaaagaaatggagtaagcacactcccttgcactaactacaacaaaaaaactcctgaacaaaatacatatagcaactatttgagaactctaaaaataataacaataggtaacttggggagggtcagacctcaaagaatgactcataaagcagtcatttttgtgcttgtttcttgtaaatttcctggtttatattgaggacagccttgattttcaaactgtggaacagacacaaacagaaaatcaaggaaatccaatactttttggctaaaagaaaacggggtgtctgtaggctagagtagacagggaaatcttttttttttctttctccctttttttattctccctgccacgtactgagtcaagcaagtctcagcaagaactgaaaagtatgcaaggagttgcaaaaagaaaaaaactagagaaaaagatcccttaatcctatatatcaagtccttggctaacccctaaggtacacatgtttagaagtgacctgaagctgcataacaagagctttgaaaacataactagaatgtagaccatcgtgcaagtctcagatagtgccaggctggcacacattctgggccagtctgaacaggaccacaaaagttctaagagctaagccaacactggaaccacagctcacagaagggaaggtgaaactcatgttctaagcctaacccggctggctgattgctgaaaacaaaaagaatcatcaattagaggactttaacagaacccaaagtctctcaatgaaagacccaggatacaatccaaaattattcagcatacaacaaaatgaggacattttcaacagctctcgagtgtgaaacttgatcatccatattgggtcgtttttgtcattcttaattaaaacagagtcaaaaaaccagaagggaaaaaagcacccagggcacataacattgctccaaaaatgtaattcatttcaggactggttgctgaaaatgtctgctttaacctgaaaccagttgtatctaatggctactgaggcaaatggctgcaacttaagactagttttacctatcactggcactcaccaatgagagctcatgagcttcccaaaaccttaccagtgctgatatactttctcaaagagcaatagataacatttctcattttttctgtgtgtaaaacctctaaccatatctttgttctttggacatacaccaaagactactcagtttgtgtgtattccttgaattgcaattctttcctcccaaaaaaatatttgtctctatattttgactttgacaaaggagaaaaaacaatgaacagaaacaattcctgagatgatgcagatgttagaggcattagccaaagaattgaaagcagcttttgtaatgatattccatgaaaaaaaaaacaagaactttgaaataaatgaaaaaaagctttaagagaagaaatcataccaaaaaaccgaaaatttaattaattttttttgagacagggtctcactctgtcacccaggccagaatacagtggtgtagtcatagctcactgcagcctcgacctcctgaggctcaaatgatcctcccacctcagcctcctgagtagctgggactacagatgtgtgccaaccctccagctagttttttcatattttttgtagagaagggatttcaccatgttgcccaggttgctctcaaacttctgagctcaagcaatctgcctgcctcagcctcccaaagtgcaggtattacaggtgtgagccaccatgcctgacccaaatggaaattttagaattaaaaaatacaatcaataaaatctgaacattcactgaatcagcttagtagcagaatagaaatgggataggaaggaatcaataaacttaaagatggatgaatagaaattaccaatttaaacaatagacagcaaaaaagaatatggtctcagagacctatgggacactacccacaggtctaactaacacccatgtcactgaagtcacagaaaatgaaaagaaagagattggagcagaaaaagaatatttgaagaaatgatagccgaataccttccaaatttaacaaaagtcataaactgacaagtttaagaagctcagcaaatatcaagcagtaaaataaaaaacaaaaacaaaattaagaagaaccatatgtagatacatcataataaaatggttgaaaaccaaagacacaggaaaaaaattgaaatcagctagagggaaacaaaacattacatatttgaatgattcaacaatttgaatacctttagatttctaattagaaagcatggaggtcagaatagtaaaacggtacttttgaagtgctgataaataaggaactgtcaactcagaattttaaatccagtaaaactatctctcaggaataaatgtaaaataaagagattatcaaaaaaagagagagtaagttggcggcatgcctgttctaaaagaaatgctaaaggagccgcttcaagaaggaagatgataccagagaaaactgtggaacttcagaaatgagggaagagcaaatgacgaggtaaaatcgagataaatgtattatttttattcttttaagttcttgaaaatatgcttgactgttgaaagcaaaaaagaataacactttgatggggttttcagtgaaggtatgtgtaatacataataacagttacaggacaaaagggtcgtgcaaaggacctacatagttaaagatttatatgttccacttaaagaggtaaaatatcaactctaagtagaccatgaaaaattaggcattaatgttgtaatctttagagctatcaataaaaagtctactcaaagaaatacatttgaaaaacaatagataggttttaaattttcaaataatccaaaagtgggcataaaagggaaagagaggagaacaaaacagaaagcaaaagatgggagaaaaacaggccaaaaataaaatggaagacctaaatccaaacatgtcaaaaattacattaaaataaatggtcaaactacaataaggaaagagattgctggattagagagtaaaaacaagacacaactgtaagtcgggtactgaaacccacttcaaatataataatataaaaaagtgaaaggatacaaaaagatataccatgtaaatactaatcaaaagaaagttgggcaatgtttgtcttgttccaaagtttatcttttctgcatcccaattttggtaatgtttacacaattttatgtatttattaatatagaaccatacataaacaattaatttttgtgcatgcaaatttaaaaaataaattaaaaacctacttatagttctgccttcttaatttacttctttgtacactctatggttggcctccatatctgtggaattcaaccagcctcagattgaaaatacctatactgtatgtccaaggaactcatggatatagagggctgactggaggacttgagcatccaagaattttggtatttgtggaaggtcctggaacccatacctcagggatgactgaatactgtataatccaaagcatgaactttctaaattctaaataaatcttttacaatcacacgatccatcctacgtatgaaaaaaaaatgttgattttaaattcaaagttcaatattgcaattccatctacaattaggaacagtattcatctgcttggaacagaaactcaaattaacagtggtttacagaaattatggaattatttttgcattcacctaaaagaacactagaggtgggcagccccaggctgcatgaaccacctggatgatagtggtacatgataccttcagtgtctcagggttacactattactgtggtttgcaatcctcataactacttccatcctcaaggccatccatggtcacaggacggctactgctatatagccttcaggtccacgtacaaggaagcagaaggagcaggtgaagcagagagagcaaagagcctttctggaagttacatcaacaaattccactctccctcccactgaccacctctttctgcagaggagtctgggaaacgtggttttaaaagctacactcactgtcattctcaacagcacagaggtcttgttaagtgaggagaaaaaagggatagagaattactgggtaggcaaatgatagtctagttgtttaaaccactagccacaaatctggtactaactttttggatattcttattttagaaaagcaattcaagtcaggggaattcaacatgaaaaaaaatagacagcaatgaatttcattcatgtatttataaaactagaaccatgtttgtaatacttctgtgaaaggcagaatatgacagttattacaaacacagttgtttgaatacatactaacaagcacatcatatctcaaaattatggcatcattctatctttaggattccaagataatatgtttgagctaagtccaactggatttaaaaacggatgcttctagaccagaaaaagaaaagcagaaagacatgtgtttttaagctgagccttacttcttcatgagaggtttttgcctgctgaccctgttccggtagcttagatgcaggcggtgatgaaaggtcatttcacaacttcacatgttccagatggtgcctctttggaaagaatctctttctggtaaaagctagaaaaagaaacttctcactacttactgcttttagcattttgtttcctgccaacatgaaaacaagccccgatgatgggacaagacattttctcgtaatgtaattgtatccttcgaaacacagtggtgtagaaaacacaaggggacgcaaaactgaaaggaagaaagctgtatccaaggctaggcttttctgataaccagccattcaaactcctacaagttatttccctttagcttctgctactctggacagcttctgcacattttagaagaattctcaattttcttcctttttaaaatgaagcctagagtacagtgacttgtccaagactcagaagcagaacaggaacccagatctcctgactttcagggaaggtccttttccatctcaccaaatggatgatgcttttatgtctaagaaacccatagtcttcacttaaatgtcttcggcttctctgaagaaaaaagaagactgaaaagtgaggttaagagaccaacatgctggtcccagatctgtcaccaactagctatgggactttagggttcagttcctcagatgtaaaatgagagggctgtcccagactagggagagtgctgatgcccacatgtatctggccctgaactttgtcagatattttacatcacagcaggaactgttcttggatcaccttcttaggaaatgtgatcagtgcttcccaacatttcaagtcaggacacataaataaaatgaagatattaacattctacagtggcaaaaatggaagtggatgcttggagctgcaggtgaatctacctgggtgcaagaaggctgaggggaaaccagtgtctcagtgcatctgtaaactcacctgctgtacactgctgggaagtgggggctaagtgggagttcagatttttaatgttttggtagcagtctggaacctgtagctttacagtttttgtcagagccaactctgcatggggagattcccccaggacctctgctgctggatggtgagttggggaggaagggaaatacgggactggggtgaaggtggcaactggaagagctgaagagactcaatacagtgtgagagtagacagaaaagttgtcaaccctcaccaagacaaggagaatgagacaggcctcatgctccccatttatactaatcactcctcctatttagatcactggctgcctctttacaactccctttcccttaaacagtcttttagtattttctgttcacttcagatggatttcatctgggtaagaattttggcctatgaagcactataggatgtgttcggtatctcagcaacaagagatgccttggtgtgggccagtcagtacttacaggcttagataaatacccagtgctcatggaaagacatacagtctagaaacagcatgcttttcatattttatatgagatgaaagagagaaggaagacatgggatcataatctggaggaacgaggctcttagtaactagaaagttcaaagcactagattatttctattctctttccttgaactaagcaagcttttagaaaagaaaagaaatataacacaaactcactgacaccagggatttattcagccaagcaatttccagaggctatcctggaatcatttcacattcagctcaatactctgtatcttccacattcatatcttttgtcctatacaatgataattgatggtcagcattacagccctgaagtcttgcaacacactgaatcatcaaagggagattcaattatattcataagactggatgtgccatagcagcaaaggggacttggagattgagaagggttgaagcaaaagattttctggttaactcttagtaagccaaaattaactgaaaaagtttcagctctatgcaatatactggttgatggagaaatactttaatatttgaatgtgcacaaagaggaacatttataattttataaccaactcagcagcaatgttattggaagaagattttctatttttgcccagtagaaagtaatcctaaacatcttttcatgggagccatcttttattgtcagtaattttgcataattaaaaatatctcttagggttatttttgcttggttattttagaaaactatgaaatacaaaagcaaaaggatgaggaagatcttctgggaattctaccattggaaattccaaagtaattgctaatattttggtcaatatcattgtaatgttctttcatctatacatattaatacatttctaagtttcttaaaacacttgtataggtaaattttcacctaccttttcacttattacatttgaatatctttccatgtattcaaaattcttttacagtgtaagttttaatggttgtagaatattctgtcatacaggtttcagaatttagctgttccccattgttgaagacaagatttgttattcatttatctttctcgcaaacactattgtaatagcctatacctcaggctttgtttacttccatagagacccaatacctagcacaatgcctggtatgctgtaggccctgggtaaacagacagtgaataaattaatgatttcctcagcatactttccagaagagaactgatacatacaagaccatacatatatgatatgtaatactaaaatgcccccagaaatattgaaccaattaatactcctggcagcactgtgtgtatgtgtccagaataagtattacttttaaataacaacaacaaagtcattagttgattatcaaattctgagtaagcatcaaaacatcagtgggaatgtttgggaagatgtcagggcaactctggaatgatatttcttccttgaactggtgaacatcccatataatttacactgctctcagttagttaccctaaggttaaatggtatactcgagatgagagtttttcctgtgctttatttaaattggggactggtaaaatgtcacctactgtctgttttgtaaataaagtttaattggaacacagccaacccgttgcttacatgttgtctacagctgcttttatgctacaatggcagaggtgaatagttgcaacagagaccgtctggctgacaaagcctaaaatacttattatctgaccctttacaaataacatttgtcaacttctttaaaagagcacttcttaaaaaatgaaactaacactacaccataataaatcagctaacaagcatttattgaacactgtgaggcatggtgtctactctcaaggaacttgaaatataattgtggagtaaagcaaatacaaatgtaaaaattagccgaaaaaggtaccgtggcattaggagtcgagtactgtaatgaagtgaacaagtagtgaaagatttcagagacaggagggaaaaggtgggattggaaaaatggcaagatgtcactgagacacagaacttgaattaggctatgaatgaaaagaagggcttggataaaacaaagcagacagagcagactgttctggaatgaagagcatgggcagaagcaaagaagtggggctctgcacagtgtggagataccaggtgggactccatccaaaatgctggcggactagcacatcagaagcatgctatgtggtacagtatgaaagcaaagtgtatccatgatctgtgtatttcaaaggcattcattttccatgtaaagaagccctaaaatacattttttacttaagcaaaaaaaaactctcataaagcaaattaatattttacgctctcttcctacagtgcatattatctttcatctcctcacttctgattctaattagagttctatttcttcaaaaacttgaatgctgatgtaaaaactaaagtgaaagattaggaagactagaaagaaaataagatcagtatcataatacaacaaacaaaagcacaaaaggacaggcaaactgatgttcatcacttaatatttgccaaagcttcctaacaacacatttttctgaatcagttaaaaatacagtatctgcttattttctagtcccttgcatccaagctaacaaatgccattgtaaaattcatgtctttattttttgttgtggtgtatgcattttaaaattcaaaatgttttttaaagcttggaaagaaagatgtatttatagtatggcaattattattcaactcatctttacttagaagcacacttttacatgctacaggtgaggtgagatggatacaacattaaatatattctttctcaatgtcttatatgtaaaggtacaggtaaagatggccttttgggaaaatgtggagcatgggagaaacgttttcctccttttccaagcatagctccttcattccaaggtagtaacaatgacatctgccatcagattacccagacatcaagtgacacagaagcaaggcttatatagcactgtcacagttttaacattttagtttcaggggtacatgtgcaggtattttatatagataaactgaatgtcacaggggttcagtgtacagattatttctttatccagatagtaagcatagtacttgataggtggtttttcgatcctctccctcctcccaccctccaccctcaagtaggccctgctgtctgttgtgccccaatttgtgtctatgtgttctcaatgttgagcttctatttgtaagtgagagcatgtggtgtttggctttctgttcctgtgttaatttgcttaggataagatttcacagcagttttaaatgaagggtacattaataaataaatttatcaaaaatgccaccacagcatttttgatctcaatataaaatgtagcaggcattcctcccagcacacacaggttaaagactgcatcatcggttcagtccatgatttttctgttgacacacatctggtgaatacaatgtgctgaagcaatacaaaactaaaacaaggcttttgatggaagaggtctaagaatcataacatactgagtgtgtcagaggaagtcactcgtgctttttcactaaaagaagctttacaggtgggtgggtggaaggggatggagaacagttcacactctccatctcatcctgacctgggacctccttcctgtttccttggctggtgccagcatttccatctttcttacccacttctgccatgttgaagctcagctgggcattgtatccctggaggaacagtggacagagcaggggctttcctcttttgaggcacctacgtagacagactcactctctctactcggaaaataactgtccctggtgccaggttttggaagttgaaatgttttgagctaatgcctcctgtgattcccgatggcctactgtttaattgtgtaattatagacagttaaaaatgcatgatatgtgatggtgagaaaatagttggtgcttcgggagccattatggattacagtttttgaaaatttaaaacaatgcaatatttatatagacttggctgcactgagttattatgcaaatgccacatcccactctagggccagcattcctccccagaaacgaagaaaggcagatgagaatcaggagagatgccacagtgaccacatggttgggacaacgagcatcttgagtgtccagctgcaggataccctgtgagtttctgtgcctcagtgatgtctgtgcctctctttaagtggtgttaagaaaacccagtcaacaatatctaaataattatttgacagttgctcagattcgctgtaagagaattatatgagctttcttcttatggccacttgcatattagacagggccaaaaaaaaatcacaccaagccaaaagtaccttaggtattcccagagtcaaagcattggcttagcaactatttataggctacacagcttccttgaaggtttgatccactcaggggcttgctcagcaatggcctatctggtctatggacagcaatggaactggagtaatcaggggtgtgctggggactgaggagaatggtatcagtaaaaccaaatggttgtgacacaagacttaacagttggctaaaacctgaagctctggtgaaatattattcatatagggtccttgtacttatgccctacaagaactaggattgattccaaattgtttgtaaacctaagttaaaagcaatggattggcatggatcacgtatcttaccagacaggaagttatcagggtggtggtaggtgctggtgaccaaggcatagactgaattctgcagggagtacaatatacaaacagtgtgtgtgaatgaaaaagaaactctcactgttcattcattcactcgttcattcttttttcatccgtgtgtttgtttcttctgtcattcactgagtcaccgcaatctaaggtgatcccactatgtgtcaggatttgtgctaagtgctgaggatatagcactgatctttgatttcagttctaggaattcacagtcaattgaggaagaaaggcagaagaactttgtttctgactatcagagatatataaaagaacaactctggtgagttcagaggatcttgtgtaactgcctggaggagtcagaaatgacacctaagagaatgtgaacattgagatggtatcagaaggatgattaggagtttctgagcacagaaaacggggaaggcatccgtggcagaggctacagtgttcaacaatgcatggaagcatgaaagaacacagtgttttggagaactcacacattatccagggtggctggataaggaaaaagaagttgagggagaggaatgtggccagggaaccatgcacatgcctgggaatgggccttgaatgtcacagtaaagaaaatgaaacagatctggaatgaatggtgtacagtttcatcttgggacctgccatcatcatttagtgtaatgacatcatagaagtattcaccatgtgcagagcaaatatatacatgcaagaaacaaaatatcatggatagttaacattcagacaggcttattttcaaatctggattctatttactgtgtgacctagagcaagcttctgaaaccagcagaatctccatttcctcacctgtaaaacatggatgacacatatatggtgggcttgatttcatgaataaatgggatacagtgaggaaatgcttcactaaatgtcttcaccaggctctgaatctcattcttgcttcactaaccttaagcacatcgaaatggtataagcttctgagctttggttccaaaagttcagtctcacctctgcctttcaactgaaataaacttcatacatcaagctttccactactgaaagcctcctctttcaagagacttacagccaccattcatgacctcagcatcaggacacagaacatcctacatgcttagctgatacacttaggcatatgtttacatgttcccctcaaaaatttcaaatcgtttttcatatagagagacttcatcgccttaagtggaaggataatgttgaaggttcacagtaaatccaaatatgatcttgctgattacaaagtttaacaaagtttttattaaagggcctgatgtttaatattttaagctttgtaggccacataggtaggtctcctgcatattcttcttcttttataacaattatttaaaaatataaaaaccatttcttagctagttggtaatacaaaaacagtcagggtggggagatgggaagggtagttttggcctgcaaactgtagtttgcttacccttggattaggaaaataacataacagtatttgatagagctcataacatactgcttcagaggaagcaatggctaaaacatagtactgctaagaagtccccaaagtgtgtgaggctctcttagtaagcatcaggcacctaccacctgcagcaacattttagagatgatgcagcatttaatagaatcacaaagcagtaatggtctaggttgactttaaattgttttggtattctaaaaaataaaataaagaaacttcataataagtatggcaattttttaaacagtgaaacagatacataaccacacacaacatatatacacacacaaaaataaaatgtgcaagatttttaacagtgcttatttctgggtaatgggattgactgggggaagttaaaatgtttttcatactgttagagtttgaggtagcataaaaaaaagctgccagttccttttggtctggtcttggaatcaactgaaagagatatgtcaggtaaatgcagaatcaaatatggcctgtataagtgatgtggcagttagagcatgtgttataggtccttgagtgggcaagctggctaattaattcatcgctggtttccataaactggctcacccttggagaactgcaggtcttcgctgcagcagcaggacccctcctgtacagcagaggaaagatgagaatacacagaccacagtgaaaactagaaccagatgtcactccctaccctggggacaagtagatgagaaaaggtaaaggaagccaagagtccattacattggtaataagggtcccccaacatgcactgatttaccacagataagaaccaaccaggaagtgcaaaaattcccaagagattgaacaatcaatacttgctaccagaatcttcttctctcagtagtttctagttaaagaactgctacttctgtgtgactttggatcaatcagttcacagctctaactcatggttttcatgagcaagttgtaggagctgcactaaaaggtctattgaagtcctcttccgccattctttgtcaattactgagctctactgcataccaggtgctacccgtgctctgggaatacagttttggacaagataaactcagctgagaagttttcattttagtggagaaaatatctaaacaaacagctatttttatctgatgcccagctctattccattttccttctgaagcaaagtaaaataccacattaaagaaatttgaggcagaagtgactcacaccggtaatctccgcactatgggagaacgaggtaggaggatcacttgagcccaggagtttgtcaccagccagggcaaaataagtaagaccttatctctacaaaaaaatctttaaaaattaaccgggcatggtggtgtgtgtctatagtcccagcaactcaagaggctgaggtgggaggatcgcctgagcctaggaattcaatgctgcagagagctatgatcatgccactgcactccagcctgagtgacagagcaagaccttatctctaaaattataaataaaaaaaaatttctgatccattaacattattttgcttaattttctcaaaaataccagtagagagatcatacatgttttataacaacataagaaataaaactaacttttcatgtgtgtatcagcctgggaaacaactactaaagaggaaagagaaaaccggatttgttgaaagtttagggaacattgggggcaagaaggagatctgagatgattttagacacgaacattttatatttccatgcatcatctataatacaggtatatacttgccaaacagcaatgctatcatgttgacattgcttgagtaaatttttaaaaatctagaaaagtgatttttagatgagggagtgtgagaagcagaaaccaaggagaattctcagacacagaacttgttaaaacacctcatcttgagatctattaatctctgagtttaattaaaagtctgaatgaacaaacttattttatctgatttggttttccttctgataccaagttccatttggttttccttctgataccaagagaggttgctgaaactttctcacctatttacttgcatttactctttgtaattgagtgaagacctaatgtgcgaccccctggggcattctatagctaaactaaattactggtgaaatttacaaatccaatgacaaagtaacgcaaagaccaaaaagaacagtctaaaaaaattgctccttctctttttcaatcaatcctcaggattaaagggagaatttattgataaagacagagaagtaatctctgatggagcgagatggtgtatcagtgttctccatattcgttcaattaatagacttcactgtatgcaaactctgataagtggatgaaatgtgttgtttcttaatgatctaatttgtattccagcaggatgtaggctctgctagacaaacatttcgcttggctatttccctccaaacatttatgcctcttggtgtgctagccatttattttgacagtggggcttgatgcacatctctactgttaatagctctgcaaacattttacaacaaaaataccatacaactggaactaatctcattattttccatgttaataattcttacagcaacagaagatcattaaaacccagaatggtaatgcacagatgtttaatgtagatgttcaagagctcctagccaagtcattccttcactgcttttcacaacaaatatttactgagcaattactctgttgcaggcactgtgttgtttgtacatatttttaataaaacaggtatgatctccttctttacggagctgccattctagtgggagagagatcactgagtttaacaaacaagtaaatgactactcataagttgggataaattttaccagggctgtattttccctcaccataacctcccttaacatgcctcctctctcactattaaaaggcggcttctatcatttgcttgtatgatattcctaccacttacttatttttcatctccagttcaaagattaactgtagaatcttcacaccgatctgatgtgtaagaatcaagtaattggctcctagaattccaaataaatgaagataaacatagcccatgcttcagagttggcacgggcactaaacaaaggcatacctcattcacatttttgcagaagccccttgaatatttctatggcctccagtagttggtcctcattctcccactttccagtcttacctcatttgtcccccgtacgtgaagtacaatagctctttctgcaccaaacctctcacccctcttcttttcaaatgaacctcagggtctctaacaccaagctgttcctgtctgaacaagctctcctgccctctcttaattctccttataccttccttaccatacctcctactctaaccacccagagagagaatgctgccttcacattttaaactgtgtcatataatttatggtagtgttttccaaccccatcagatgcaatgttccattttataacaaatattatgtaatgctgcctttactatcctgaaatgaaattaacagataatataatttacctacaacattatttcaagaaaaaaatcaatatgctgccctaactgtaatacaaaggagaaataaaagggaagtcatctgtaataaaacgatatgtacagagaaatgctattctagaatatagaatgaattaagcagaagctcgcacctacctataatgaataattttgtatttaaaagaagaggattatttttgaacttccatacaaggcgtacaagaacataaaagaacacaagtagaagctgacactaaaataaaaactaataaaacagaccagacttatctgtatataggaaatagagggaaaccaccttaaataaagtacagagaagatgcagagacaaattacagactgtcaaaacagagatgtgagaaaatatgatgttcctataaatgacccaagacatatccaagtcttaacattataccttgagtatggcatgcaacagggtagtgataaatatcatagaaaatgtatctctcatcttaaaatcccaccacctgctgaagtttccattcagtctatagtactcacaacactttggggaacatactctttagtgggccattgcacataaaacatgaatgggaatgtgacaagtacttcatgtcaaaaatgagaaatatttttaaaacaagctttaataagtttcaatgaggtctattgagtttcatgtgtctccactaatttaatactgtttgattctaagtatgtgaatcatagtttcccatcttgtttactacatatttgtatgtggcaactataagtggagactgatggctcaaaaaaaagatgtcttcttgttaacttggatggttcaaatgatgcccctgttgagggcatagtctaccaaaatggtgaaaaacacttgtcatgctctgaataaaacaaagtactcttcatttacaaaagagatgcattctaggaaaattcaatgtacattgaaactatggaaaacatatcttgtgtctatacaaaaaacagagttaggttctagacattcatttgtacatacacaagtgtccagcagaaccaggggcaatttttgtttgggaatctttattgcatgctaaaataaccatggctttcctggttcccacatattaaaagatcataacacacccatgataactgggatgacaacaaaagttccggtaagctttcaatatattgctaatgggcagtactttcctagtcaagacctttgttttgtggagcgtttctacagaggagccaaaatctcatactattcagtcttttctttctcccctatagcttagaatcttcccaggtgtccttcaaaatgccttgctaccatgttctcacaaaatgcaggttctaggaattccagatctggcaggctggaaaatgacccctgaaaaacatatctaactccaggccaggtatgtgtctcatgcctgtaatcccaacactttcggaggccaacgtgggaggatctcttgagcccagcagctcaaagccaactggggcaatacagtgagaccttgtccatacaagaaaattaaaaaaaaaaaaaaaagaaaagtctaaccccagaactctttgcagttgtaattaggtaaaggatcctgagattaggagatgatcctgagatatctgggtaagctctaaatccaacgacaagcattcttataagagaaaggtagaaagagatttgagacaaaaagaagaagagaagacagtttctgcctccgtggtcacactgccacctcttcgttgtggaggcagtgggagaccatggaggcagaaactggagttacatggccacaggccaaggatggctggcagccaccagaagctaaaagaggcaaagaatagatttccccttcagagcccaagggaatgtggctctgcagacaccttgattacaaacatctggcctccagaactgtgagacaataaatttctgtccttttaagccaccaagtctgtggtaattggttatagcaaccaaaggaaatgaatacagcagatgagttagacactggccagggtagaagaaaggttaatatcatgctttgtttatgtgtttgttttgccctaagacttctacattctctgaacacggttggagacttggcgggggaaattacagaatagagaaacctctgttctatttcaaacgctctactcagcttccctccactccactgtccttcccaggtaatacctcgctgatgtggtttgggtctgtgtccctacccaaatctcacattcaattgtaatccgcagtgttagaggggcttggtgggaggtgactggatcatggaggtagatatcccccttgctgttcttgtgatggtgagtgagttctcacacgatctggttatttaaaggtgtgtatcacctccccattcatgctctcttcctcctgctctggccatgtaagatgtgcctgcttccccttctgccatgattgtgagtttcctgaggcctccctaaccatgcttcctgtacatgcctgtggaactgtgagccagttaaacctcttttctttataaattacccagtccaagatatttcttcataggcatgcaagaacgaacgaatacattcactcagcctatggatcttagcttgagatttccttccccatggaaacctttcctgtccctctccagctaagtgagattccaccacatgagctggaatagaattgttttcccattctgcagaccactcacctcattttaaaactaaacattgactacaatgagtcctcagcaaatattggtttaccccactagaatgtaagctcctctagataaagggccctgggtatatttcctcaccattgcttttctctgtggcctggcatggtactcacataaatattttatgaatgaatatttagatacagtcatttacagatgttttggtttaaaaaaagatgcttggccaggcgcagtggctcccgcctgtaatcccagcactttgggaggccgaggtgggcagaccacgaggtcaggagatcgagaccatcctgactaacacggtgaaaacccgtctctaccaaaaatacaaaaaattagccgggcatggtggtgggtgcctgtagtcccagctactcgggaggctgaggcaggagaatggtgtgaacctgggaggcggagcttgcagtgagccgagatcccaccactgcactccagcctgggtgacaaagtgagactccacctcaaagaaaaataaataaataaagatgcttgtcagtcagctttccagcagcagcaataaatttctttccaggataaagccatgttttgatgagtacattcttctagatactgtacttacaatacccatttcaatggtctcatcaccccaacctctgactcaatacttagtgtttgaacatgatcagttcatggccaccacagtgggttgaattgtgtctcctgtaaaattcatgtctacctagaaaaaacaaatatgaatttatttggaaataggatatttgtaggtataggcagttaagacaaggtcatatcggacctgaaatccaatggctgaaattgggcctgaaatccaattgggcctgaaatccaatgactggtgtcctaataaggggagggagatttggatacagcagaggaagatggcctcataaaaaccaaggcagaagttggagtgatgcagctacaagctaaggattgccggtaacaccagaagctaggaaggagcaaagaagaattcttccctagagccttctgaaggaactcagccctgccagcaccttgattgaagccatctagcctccaaaaccatgcataaatatatttctgatgtcttaaggcagtaagtcctaagttaacatttcaataggttcttggaaactgcaactttaagtgaaacaacatacagcaagtcctaaaataacataattttttttcaacgtcatttcattttaacattgatgaggaaaataactggtttcattatgcatcgttttgcctaaagttgcagttcccaagaacttatctactgtccttcattacagtggccctagaaaagtaatacagccagtaaaccactggtacgttttatggttttttgcccatgtttcttttataatgagtcacctcactgagatttgccttagtaacaccattcctttcaatcagttccagccattggctaatgagatggcacaatcagaattagaggaatataggggttcaattgtagaaaaagactgcaaaccagtataatctgagcaaggcagcagtactacacagaacagctcaggtgccaggtggttttttgtttgcttttgcagttcctgcctctttctagttacatgctgagctctgtgccttaccttcctcatctgtaaaatggaaataataataatcccttccttgtagagttgtgaagattaaattacatgctgcatacaaaatgcttagcatagtacctaggacaaggtaattaagcaataaatattagctgttactattgctagtagtggcaggggcaagggtcaaaaataatcatttcattcaattaaaaaacaaaggcctaaaccctaagtatgtgatggctgtggtagacacctgaaaaactgaatgcttttattccatgtagtgaagatcttatttttcttgcagattattctggagtttgactctaagagttatctttagatgcaaaaagtcatttcattttaaaacagcagtgcctgaataccacttatgttgcctgaatttgttcacattactattcacgaagcttgacatcctgcaatgacttctgcacaaaactcaaagtcagtaaaactttaggctacttaccatcaagacagggaacaaacccttctctctgcaaggtttttataattaaacatcatgacatctaatgatgtctacacagaaccgcttctcactagcacagaaaagttatctctaatagaaatgttctttctaaatggtaaaggagggagcatataaatatctctgcagtggtggcttctggtatagctggtcagagtggacaggacacataccaattactgttagggtttgcaaagaaaatagttcccattcatttactatttgatagaggagaagggatcaatgagcatgaaatatgccaacttataaattcatatttctaaaacctaaactaggcaaggagtaatgttcacaatgtataaccagtgaggatggttatgcctcactgtactgcccaatcagaaagagtggacactggccttaggcctggagcagtcctggaaggtccctaccactgcagatgtttgccctttacttgctagatagcaggaggtctgaggctctcagggagaggcaggggctccaagtcatacaggaatgggtaggcactccagttgactgaaggacacacagggggtttcaggcaatggctatttgccaagcaatatggaagtattttaatattgtaactgtgtggctctaaaggcaccaactagtgaacattgtcgccggataataccatgaagaattagactggcactgtgaaagtgaggtgaatcctaaggcagtcacaaagcagaggacagctgagagagatataggagggagccattgtggattggtgtatgcatggtgagttctacacagaatcagggagccggagggtttgatccctcaaattctattttagtatttggtattattttctaattatattgctgcagtaacaaaattcctttgttaaataattaaaagactccttttaaggctaaataccacctggctcccaaattttggtctactctccccggaaacaactccttattacaaatttagtagtctcattgcaggtatctttccatgtatacttatgtgcatttggtactgttttgggtgctatgtgtttacatatgtggtgggcggaattgtcaaatgctcccctaaaatgtcctctctcatccctagaactgtcaagatgatgagatatcacaccctgattatgttatgagacaaaaggaattttgcaaattagttaaggttactaataagttgactttgagttaatcaaaagagatcatctaagtggacctaatctaatcatacatgccctttaaaagcagagttttctccaggtggtagcagaagggaattcagagagattcaaagcataagaatttgatgcaccatcactggctttgaagatggaactgaccatgtgccacggaatgcagatgacccctagaagtttagagtagccccctctgagagcaagaaaatggggacttcactcctataacccccaaaaactgaatcctgccaacaatatgaatgagcttggaagcagattcttctcagaacctccagataagaaccaagcctggctggcaccttgatttcagccttatgagaccctaagaagagaacccaggtgagcccactgagacttctgacctccacacctgtgagatcataaacaggtattgttttaaggtaaatttgtggtaaactgctacacagtaacagaaaatgaattccatatatcatcctacaatttgttttaattcaatagtaagtcttaggaatctatgtgaattaattcattcctttgaactgttccatagtattccatagtatgtggtaaaccattttcaaggatggctgccaagaactgcccccatcactgtgcaaaccagctccttctcttgttattttcctgctcttagaatttgggtcaggctcgtgactggttttcatcaacaaaatctagtggaggtgacattcaagaacttctgaactcaagtctttacagaccttgaggcttctgcttttgcccttttgagattgaagaagcatgaataaaagctcaaactaacctactgaatgatgagaccccgcatggcaggggtgcagcccccagccaagcttcagataatctcaggagactctatgtagaggagaggaaccactcagctaagccgggcaacccagacaactgtgagaaaaactaaatcattgttgtctaagtcactgcattttgagatggttagtataactctctatgtgctcaatagagacataatagcacatacatcatgagtagataaattacgactatcccaattcatccattctcctattgataaacagtgttgtgttttccagtcattaaactggaccatacgaaattgccatttctataagtgaaaactggtctaatatcagcaatcttacaaacaaaccactgtgagtacttctccccatgcctctttgtacacacggtggacacatggcctcagggtgagaactaggcagaagaataggcatccacaaggttggcacatttaaaattttaccagatgctactaaattacccacagactgattcctatcagtgtataatacggtgttatatcccttgatctatacatctctagaaactccattataataaaaatggttatccaggcctcaaaatgcagcaaacctaatacgaaccaatctaaacctaaagcagtgttggcaaacctgatataaaatttctgataattaggccaggcacaatggctcacacatgtaatcccagcactttgggaggccaaggcaggtggaacacttgagaccaggagttcgagaccagcctaaccaacatggcaaaaccccatctctagtaaaaatacaagaattagacagatgtggtggtgcgcctgtgtcccagctacttgggaggctgagggaagagcattgcttgaacccaggaggtggaggttgcagtgagccaagattgtggccctggactccagcctggttgacagagtgagactctgtctcaaaaataaataaataaataaataaataaataaataaataaataagcaaataaaataaaatacagtacaattcttgataacccaaacaacatttttatttgacctttaaatattctgtggcaggtaattattttaggaaagatagatatggcttcctatttgtggaacagttaaatttatattaagttgagtttatcttccatgagtaggcctcccctaggtggtggaagtaaaactgaaatagggtatacagtgggagagttttagcagcctagaagttcatacaagttcaaaggtactagtcgctaatgaatgaagacacttcactccgcagataatagtgttatctatccaggtgccaatattgtgataacttggaggctgaacagtacaataatatttagaacatgcttattaaggggtgacttaataaacttttatcttaagcagagactctctatacaatacttatgtgaggtctattgtacttatgtccctaatgtaagttcttttcttcctctgcagtaatacaaatctagctgggcacctgaccacattgcccacgacatttggagcgaggcatagccatgcctagctaagtttgaactgacggaacaaggtgtgatgtgtcacaacttctagattttagcatgtgacacccttgacccttcacaatggcagggaggcaaggaggcatggagcagctgccttggactccgagatgatggctatgcacagagggtggcagtgtcaccccataagccctagtcatctacttctggatgctaaagtgagagacaaataaacctctctttttcaaatctctatagtttggagttttgtcattatggaagctttacaggtatcctgagttggatttcagggtttctagaaattcacacaaccaaccagcatcatctccatctctttacagattcctgaagttatgccatcgcaatttagtttctttggcttgtgatttccagcctctgatgaaatgcaagtatctcaagaaagagtaaaactgtaagctcctaagacattaactccttaatgttttcttgatcgtcagaacctttactcgggattcaataagaaagaaaggaaaatgcaagttccttgagtatttggtggatggctccaacagtaggggaacagcctcttaaaactaaaggaggctaaagacacaaagaatacggcaataatcaacacctgattcacagtgtggccacatgtgtctgatcccacagagactgcaaaatatgaacccaccttgccctagctgactgggagaatgctacgacatagagaggaaagaacatatgctgtggctagcttcatttatctggggacttgtcctcagagcttgtgttgtttgggattcctgatgagtaatacgtgcattttctacatctgggtgagtcctgttacccaggaaggctgctgacactaccttgacccagtgaaaaagctccatgatggcaggcacctgaaaagtcactggcttttggcaatctttctattatatgatctcctcaaaagttgcatatgtttagaaaacacatcaatttgttttcctcaaagcaaatatgcagaaataaaattttaagaaaggcacaaaagtaaatgagagctattccaaagatgaaaccgaaagtgccttctgaaataccagcataaatacctaaagtaagaaaatttccaacgtaatgtgtttttaatcagacacatcaatctaaagtttctgcaacatctgcaaacttgaatgctattgttaatgtgaccaacgccttaaaataattgcattagggtttttggcatcactttataataagtggacagttaattgttgctaaattacagctgaatctctgcagaattggatattacatccatattaggatcgaatgactccatcatgattaatgatactgcagtgagtaccaagagaattaaaattattaggcactaattttaaagtgttgacatttttccacaattttagagttatgtttcaacaaaacttcccaattaaacttactgctcgtggttactgggtaaaattccgagacaaatattccttcaaagatcaactttattagtgagtaaacattaaaattaaaaaaacattttgttgaactatccaccttatgtaactaatagcagatgatgtgttttacactctagttatatttaaataatacagccatgtaattaaagatagttggccataattaaaatattcataacaatttcctttcaaaacattatgtgcaattcagactgcatatttgtagtaagctagaaaaaagaaacacattattagttttagagaagtacatgcttaattatcaagggagtttctgcagattttaaagaaattaccaagagcacaagcataaattggtgtttaattgtttctggaagatgcttaggttataaaatatttcaaaatatttcctaggagacaacttggtaacaattcatcagacacagacttggcagtgtcacagaaaagtaatcatgtacctaaaaatgggcattaaacagacattcatggaaaatgacttatcttttacccactgttttagtattactgaatattagtttctaagtaccgtattgggcaagttactgtggttctttgaactagctattctaagtcccaagagtaattttgcaaatgaatgaaaaatgtaaataatttaagacagtaagaatatatagaaaaaaaagctctgagctcataatactaaaacagtaacaagttcaaattttgtattcatctctgatttacccagtggtctccacggaatttgttttctgcacctgaatttgattattttttttccagggtagtttcccaggtcaaaataatgtaaggaagataaatgagataatactgagaaaacattttaactattcaaaataaagctaatttatttcctcctgtgtttatcactgtgcttcaaaaccctgtcctgatattctcagaaactcaggtataaaatgaagagatatttaagtacatattggggtcactgccactaactagctgttgatctctgctaaatttgccccatgtagcttctaaaaacacaggtgatttctcaaacatctttgtttttgtggcccctaaaatgcctaccaaatgatcagatagatagtactatattctcaaaaaaacccttttcaggcttccagaattctggtagtcttcatcccacactcccctattgaaaaatcacaacttttttccttaaccatccctttttattgttaccccatcctcttttcttatttaattcactagaataggggttggccaagtatggcctgcaagccaaatatatactgctgtctgcttttgcacataaagttaagctgaaatgcagctcttcttttacctattgtctatggctacttttgcgctacaaagtcagaatgtctgtgacaatgatctacggcccactagcttagaccactcacactggctttttacaggagtctgtggacgctggtattgaatatgcgttctcagtgtttctgtgctgaggatctcctcctacctctctaaagtgcagttgaaaatgtctaagacaaaagttaacagggtagatgaggaattactctttgtgaaccatggggatacgtcaataacttccttcaaataatctacaagcatttcaagtacaccgaatctcccaaaagggagtccgtagaaaaggtaagctatggtcaaccacttgatctgacagctggagtggatcccactttaattaatcatgttagctactgattattaatcacctgataattatattttatccatcctattactctaagttcttttgctactctgcatcaaatattttatgtacattattttacttggtccaagcaataatcatatgtagttgggccattttacagataatgaaacagaaatttagaaggactttgttcaaggatggacaactagcaaaaagcagaactgggactgagccccggactccagagtccagacgtggtagggtaatgtcacctaggtcttttccattgcctctcaccacactatgggcactcaaatcaaaaaagtaaaaattgggttgtagcaacagcgtaagaaatcctttttggttataacaaacttggaagaagtatctcatttaaactccatataaattacattctcaaatgtaatttatcttttgatcaaattaggagtaatacttttcatttaagcagtttaaatgcactctcttctgtggcttggaaaaaaaaaacttttgtctcaaaatatttccttacaatggttttcccagtacagatgtgagattatagttacctttttaaaatattttgttgacgtttgtattcttaaaatatttttactatatgcagaagctctttagtttaattagatcccatttgtcaattttggcttttgttgccattgcttttggtgttttggacatgaagtccttgcccacacctatgtcctgaatggtaatgcctaggttttcttctagggtttttatggttttaggtctaacgtttaaacctttaatccatcttgaattgatttttgtataaggtgtaaggaagggatccagtttcagctttctacatatggctagccagttttcccagcaccatttattaaatagggaatcctttccccattgcttgtttttctcaggtttgtcaaagatcagatagttgtagatatgtggcgttatttctgagggctctgttctgttccattgatctatatctctgttttggtaccagtaccatgctgttttggttactgtagccttgtagtatagtttgaagtcaggtagtgcgatgcctccagctttgttcttttggcttaggattgacttggcgatgcgggctcttttttggttccatatgaactttaaagtagttttttccaattctgtgaagaaagtcattggtagcttgatggggatggcattgaatctgtaaattaccttgggcagtatggccattttcacgatattgattcttcctacccatgagcatggaatgttcttccatttgtttgtatcctcttttatttccttgagcagtggtttgtagttctccttgaagaggtccttcacatcccttgtaagttggaatgttataaagaaacagtgatttacaaacataaaatcattattttcaattcaattcaaaaaatacaaaaaacaaattctgaggcaggtagaaaggcaggctcttgatatcaaagtaagtttctggatgtaattgaaagactgttccaccaagtgttcacattcagatagtggtgtatgttgagctaagtgggaaaggctgttaagaagtaaacatgtctgacagggtgcgcaattgcagaatgtgatgaacctgactccgtcatgtagcatgcaaatcagtcactaacatcctcgacaatacataagccaggctcagcagagcactcccagattgtgaaaatttgggagaaaaaaggagtctctggggaaaaaaaataaaagactggaaaagtgattttcaaaactgtgtaaaaactaagcacataatgcaatgattataggagaaagcatgaggtcactaagaatgaattgtaatacactgattttttctttttttctttgttttttttgtttgtttgcttggtttttgaaacggagtctccctctgtcacccaggctggagtgcagtggcacgatctcggctctctgcaacctctgcctcccgggttcaagtgattctcctgcctcagcctcccgagtagccgggactataggcacgtgccaccaagcctggctaatttttttgtatttttagtagagacggggtttcaccatgttagccaggatggtctcgatctcctgacctcgtgatccacctgactcagcctccccaagtgctgggattacaggcatgagccatcacgcctggcctttctttctttcaatacactctttagcccaaggaaatgacataggtcaaagcatcagggaaggaaaaagggaagaaaaaaaccgttttgttaattagcttcctgaaaatattttgtaaactgctatttgtccaagatcattccgctctctcttaaggatctttattccaaagtccaggtgctttgctacatctccctccactactttatttacatctctgttacctccatgatcatgcctttggctctggcattgctaactggatcattcttaactgacaggttagacaagcatgtaaacacacacacacacacacacacacacacacacacacacacacacactgtacataaacacaatggctgcatgggttctgtacactaacaataacaaggctctgaagtggtatgagttcaagactgagctcccagagagctggattcaagtcccgtgaatgcaagaggagactttcgaaatgccaccttccctctttgagcctcaacctccccatctgaaaaatgatgagtttgaatccaaggatattcctttcagctgtaatattttatcacctagcatatcttctacttcactctatttctagagtgctaaaaactcatttcttttcatttttcccagtgagaaagatggatagctttcccttagcaatctcattacatatttttacatatttgttggttattatgttttccttccatcacttttctacatgaatgaatggtataagttatcttcatcttcaaaagttctactattctatgtttgactatttttctttacagttactttttgaatactatttcctaaaagctgtgtagggcagtggttaagaatgaaggctctgaacatagactgcctgggattgaagccacttgctcaaggtaaaatttcagacaggttatcaatatggttaaatattcttatttttgaaatgaatattataattgtgccaaactctccaacccctgagaattaaaagagagaaagcattttgagtgcacactggatgctgggcccataactggcattatttatatggaagctgttggctgggcttgattgcttatacctgtaaccttagcactttgggaggccacagtgagagaaccacttgaggccaggagatccaaaccagcctggtgaagacagcaagaccctgtctctacaaagttaaaaaattgactgggcgtggtactccagctacttgggaggctgaggtagggggatctcgcttgagcccaggagttcgaggctgcggtgaactatgattacactgctgcactccagccttggcatcagagagaggtgctgtctcagtcagtcaatcaatcaatgaaagctgttattattttgggtggtgatgctggttttggctcttcctcatccccacaaagtccgagagaactagtgctttaaatgtaatttaaccaaatgagcactaaaaaggcaaatgagaaataactctatcttcttaggtaatcatggtaccttcttttcaacaataaactgaggtgacttttttttttatcatgtcctacactcttatcttcaactcactgtgcccttaaagagtctttccatatttctggcccagagctgcccctcccaagtggggagaaggttcttaccttcttgacctgaaacaaaatcattacagaatggggaaaactatagatctaaaaaaaaaaagtataaggagtgatttcttaccaaataacagagaaatcagccagctccagcagcaccccaagttggacacagagcacagcgtcaaagagatgtggctacaaatcaaccagaactgctacctgctgaacacctaatttttgccaaatgtttaattgtacatcctggactatgtcctccatcagtgaacagaaaaccggagatgttattggtgagaccagaatttcactgtttgataaaggaactcagtttctacatttggagttggttacctcatcctgagcaaccaaattccttaatgaagccagtctgaagtgtggacttcagaatcttgactgtgcaaactgtacatggaaatgacattggcatcagtagtctgcaaaaggcagcagtgtgaattgccatgtttttcatttatatctcatgttttctttttcttccttaattcccttcagggcatgagcccatgatccattacattactgttccaacttcccctttgccatggccttttatatgttttacctacttatgcaataacaaaggtatccttattcatccacacatataattcctaaacactcaaagatcatttcactcactctggtgctccttcagctgtttcctttaggacttttaagtgaatttcactggacctcaatgatttcgacacattcaattattgaagtgtgccttaacctgcttcttccagatgtgaactcactcacttgttcattaactgttactgtattaccatccttttgctattaaccttccttgtgaaggctgaagcaaaggagctattaaggattttacagccttcctgccatgcgcctgctcacactctctcccgctaataagtagcaggcctcctcctttggggtaattctcttctgtcttgacaacatatgcaactactctgtttcacctcattttctaggaaatgcatccttttgtatcttttacttcatgcctttagtccttcatatttttattgtatctttagacaaacttcttatcaattacacctaaaatatacttatttcctcattaaaaattgttcatgaaaaaatgtatcctcataggagttattctttgtttttaacattcaaccactgaacacagatgcttagaattatttcatccttgatttgctaagggacattacttttttgtttacttgatggtttagaaagacaataaatacatggacataactactgtctttctcctctggttttagtttgggaaattctaattgttctcatctataagagaataaaatactaatttgcactcaaatctatccaattgactttctcactctacatgggagaatttcctctctctactcttttgaactctttatttccttccctctattcccttgcctctcaaaactggccttcgtctgtttttgccattttacttgcattggtaggttctccattcaaacaacccagccagacacagcccatccactgggcattccaccacactaaacagtgggatgacagaatctaagaggaccagctggtttcaatgattgaattcagtgagtgccgagtggtgttcaacatatgccctgataggcaaggagcaaatgggcagagggtctgaaggaagcatttaaatagcatctcttaaaaaaatgttgctgttgctcagtttaaactatctgcttatatattctgggattaagagtttttagtgattttttctccctcttcctaacatgtttatattgcgctttcacaggcatagaaataaaacataaagcctactcactgaagccaaaatattaccatatgtgctcttctcaccgacccatcctccttctacctaaacccgtccctcctttggaagctctcttctccttttattaaaaaaggaaaacttctgggaggtcgaggtgggtggatcatgaggtcaggagatggagaccatcctggctaaaatggtgaaaccccatctctactaaaaatacaaaaaattagccaggagtggtggcaggcgcctgtagtcccagctactcgggaggctgaggaaggacaatggtgtgaatgcaggaggtggagcttgcagtgagccgagatgccaccattgcactccagcctgggcaacagagccagactccgtctcaaaaaaaaaaaaaaaaaaaggaaaactacaggaagctgattgtattagagaagaagagcattaagtgtgggctatgccaggggatacgttttagtgggaatggagaaaggatcatcctactacaccctttagtaggcaacaggaccagaagcacctgctcagtgggcaattatttggggtgtatttataaggcatcagcccaaatgctagttcttccactctccagaggagagataaatgcttctcattcatgcagatcccgagtaaaggtcaccctgtttctgaaaacatgtgaagagtgatatttgagttaagtcatttctaagtaatgactttcttcttcttcttgaatgctattgggaagtggtgaggcagaacttgtgtgactgtaaaaacagcagtttttaaaaatatggttagactagactattggaagagggaacagagttgtggaaacagctgctttggaagtttgaaaaattttattgactcataaaatgttatagcgagaagtttattttagaaatgaggaaaccaagaccctaaagcattagagaaattattcaaggtcattaagctccttatttatcaggcagaatcagaatcaaaagtgaatggctggcaaaaaccaatcttgtgggttttccaatgtatgacaacgtctcccttcttttctaacgtgaatcttttccataacttatccttacatgggagcaatttttagcctgctccactgatgcctgcctctaaaatagtgtagagttgtaaaaaaaagtcatttttacatcatcaaaacttctgaaacactgagtcagaagggatcatctaaacgctcttctgcctgcaggtgaagctggagcaaactcttcacactagaccctgcaaagtccctcagggtagaagggaccacggccagcgcccactacctccttgtcatcatctaatcttcataacctaaaaagccaccaatgggctccaacagggtctgtgggtcatgactgtggctgcatgtcgagtcatggtctctgcactcacaaattttgttttgcataaaagctgtattactgtaaagttgtaagacttagtaaaattcacattttggacattttaattcgagctcaaaagcagcagagatccctatttaaaggagacttgcaataaaactacacaaaatgtaaatacatgtgttaatttaacgttagtaaatccatatgttcttttgctgaattatcatatttagaactttgtaaaatagcagtccatctgcatggagtgaagaaaatgcccttgaataacctgatcagccatgctagccagcccatgacaagcacctccaggcagacacttactgagagccactatgaggcgggtgctgtgccatgttccctagatacagatataaatatatagtgccttggacttgggaagctcaaatctggtaggggaaaatagacttttaaaaaataagttagggcgtcatctaaatggttttgttgggaatcatttcaccatcgtcttatttctgcccatcatgaaggcatattcctctaaggtaggaaataacctttaaacattatctagtccatctcactgaccctaggcaataataagatttaaccactcttgtcatttgaaaaactgagcctcttccaatagtctctaatatttaaccatctttactgttaagatatagttgtattacttacagcctaaatccctcatgctatttttcaagttcccttcccttctcttattgactctttggagatgatgataagcatttaataactctgctaatttaacttgaagatcatcttagtttgctgttttctgtgatccagagttctgatttataattaactaggcagtgtgcataattctcttctgtgtctgccctaatcagagaagcctgaatattgtgcacagcaggcattcagaaatacctgtcaagacaacaggcattccagataaggacggataagcactgaataagagagaaatgctagaggacagtatccccgatgcacataccagcatcccaggatagcacctctctttttaataacagtcttccacggagtcccttgagagactaagaaccatgctcctacatctccttaactctttcccttcatcaaacgcagtcactcgcacactacaagtcttcaatcaagttgaatgaataaatgaatgaatgaaaacagaatttcaactttcactattataatgaaccctgttagcctttccttacataaaaattcatttaacattcaagggacattatgtccttgccaatacttttaaaaaccttaactacagtcaccatgctatataatggctctccagaacgtattcatccttcatgagtgaaacttcgtaccctttgacaaacagctctccctttctctcactctccaatccctggcaaccaccattctactctgtgcttctatgagttcaactatttaagacataaaagtaaggttatacagtatatgtctttctgtgtctggattatttcacttagcatagagtcctctagcctcatccatgttgtcacaagtgggaggatttccttcttttttaatgataatattccattgtgtctgtgtgtatacacatattttctctacccattcttacactgttggaaatttaggttgtttccatatcacagttattgtgaataaagggcctataatatttatatgctctatactctttctccttcttccacatcttgttaaggactaaccattccctctcgggctaatttgtaaaagaagcaattccaccaagcccttcttaaaattatataaaaacttcccagcctgtacgatgaggcctcaaattatacaacaatataagcttcctgagcatcttgggataaacgtgctttatagaattaagataccacttacttgattgtaatatatcttagggctacatagtcaaacctttgaactcacatcaggtgatgcgtgctgcagaatatagaaacaagattctacaaagcagtctggaaataacatgtactactgaaaaacaaaaatactgtaaattagtataataaatcaaggaatcagcaactctctaccactaactaaatcagtaatgctttcttcaagagagttatgagaattatatttcccatgtggcttgcaaatgtaaagagatctattaagactgtctgatagttactgccgaaggatatataggaagtagaatactaggaagtattatattcatgacattgctctattttatttataatttttataagagcttaaaaatctaggtttcatttaagcattacttgtgtgatacaaaaaatatagtaatttagagtttgatattttttgaaaggctttttcaaataaaccattcttttgaattcaaatgattaagaggattaaaagtatcaagaatttatttcattaggcatttcccaatgggatcaagtttttctgaaaaaaaaaaaacttacgtaaaaccaagtattaaaacatttccactcaaatacattagggaaagtcccaaaatgaagcacagaaaaaataatggcaacataaattcaattattgtaccaagtaatcgcagaaacatgcagaaacatgggcattcaagtaaataaattattctgattttgctcctagctgacacaaattactcatttccttggacttgatacaagaaggcttcagagaaaaagaagaaatgcaatcaaagagcaaagcacattactcatcatctgccagccttgcagcaacagaggtttcctacagtccctccctgccacagccttgcaggatatgtctataagccagtctaatacatgcttaaatgttctcatttacagactcgatttccttttgcgggttcctgcaaaagttctcaatggtggtattgcaacttgcatccaatagcaaagtgcctgtagttatttgttactaataaagtcctgaagttttcaaatgacttgctttaaagaactgatcctggattatttctaaaatcagcaagggcaataaagtatttacaactagtagggcctggcatcaactaatcagaaaggacactggcctgagaagatgctgctgtctcaggtactagatggtggcgaggttcacggtatcacagaaggaatttgttagtgcaggggacactggggaggagggagagtcaggacattctaagctttcatcaaccaggagggaagtatttcggcattttaaaaacctagtgcatctgtctgttagggcgagaaaaagcagaatatcattccagataaattattttagcttcactcacatgcatcctggtgtgctttcttgagtggaagaaagtagatgaagtaacatgctggaaatcacacataacctatggctttcctcatttgtgaacccaaggaagcgtgccacatatagaaatacaaagtcagagttacaactttgcccccgtattctcacacgctgtgttagttaaggctgccataacaaaataccacagactggggggcttcaacaacacaagtttattttttcacagttctagaggctggatgcccaagagcaaggtgccgtcgttgctgggatctggggaagcctctcttcccggcttacagatggtaaatttctccctgggtcctcacatggcctctcatctgcatggccacagagaaatagtgttctggtgtctctacctcttgttacaaaggcaccatcagtcttatccgattaaggtcccatctataggtcctcctttaaccttaattacctccctaaagggtgcatctccaaatacagtcacatcaggggttaggggtcgaaaattcgaattttggaggtacacaattccatccataacacacaccacgtaagaggaaagagagaagccttctcccacacattttctgctttgaccaatttaagtgaaggtgaatttgtgattattactgtagacaaagaaccctctaaaagcagattgttgctgtagacctgccatatacccatctcaaaaaggacctcaccaaaccccaggccaccttggctaaaaccacacctaattactataactgtgcatctcaatgatcagccaacaagcactactgactaccaactatattcccagaaccaatggagagatacaagaagattcacatcatttggggtgaatgagagtatgcctgtgaattaccagtgaacaagatcaactcatttacatgtaatcagtggggatcagagccttcctgatggtcatgtagaatgtgcacaggtagaacctcactctacaaacacacccatgaccatcacctctctcatagccctctgccatgattctcatggcaacaagaacattctctgtcatagcggcataaccctaagcagactgggcccgggtaccttttggtgtaggcaacatccagatagctgtttctttctcactgtaatcatttccaatttcattcaagagcctcattcacactgggctgtgatgaacatttggctaacagattgcttaagtgaaaaacacaagagagtgaccacagagtaaaagataaattagtggaaaaaaatcacttgaaactttcactctaggaagaaagggacatagcacaggatgagtaatagaatctcccccagcccacagccactgccaatagatactaagattccaggtaaattaaaagaatacatgagaggtcactgaaacagaaatccagctgggagacagaaatgcaaaattctctgtagaagaaaatgggtagaccaagggcagtgcaacatatagaaaaaacatgaaactttacaattggaaaaatacacatcagaagttcttactggtcttatgaccttagccctctgagtcacagtttattcatctttaaaataggtatgctaggtatggcgtggtggctcacacctgtaatcccagcactttgggaggctgaggcaggtggatcacgaggtcaggagatcgagaccatcctggctaacacggtgaaaccccgtctctactaaaaatacgaaaaattagccgggtacggcagcatgtgcctgtagtcctggctactcgggaggctgaggcggaagaatagcgtgaacccgggaggcggagcttgcagtgagccaagatcgcaccactgcactccagcctgggcaacagagtaagactccgtcttaaaaaaaaaaaaagtatgctgttcactggttaactacaaggactacatgacaatacagaggcctgcaatcacacacaccctccaatgtctctggaacataacaaaaaccactataaatatctgttaacagtataattaggagctacacttccaatgttaacttgcagctgaaaccatcaactatcattcacaagaatggcaatgccatctgcagtaagactcagaagtattggaaacccttccaagcctttatgtagacagatgaggagcagccatttggtttaatatacaattattgtcagaactaccctataatttgcctcctacaaatatccaaatgccactaaatggggcacaaggtcaccgtggtggagcagactgtctcatagctgactgttttatttctattagagatgacccagggccagatgtgtgcatggaatcttctgctggccttacacttttagcaaatggatacgatgaaacgtgtccccagataacaggccatagggcagccagggcagttctccttgctgaattctgcttccagctgctccatgggatgaaactttgtgttctagggaagttttctgtcaacttgtcaaaacagtcgctccggccactcacacttacatttatgttatagggcccaagtgtttggacagtgaccctaccttgggtggtgctcagaatcctctcttcccctaaggatagtttacacaattggagtttttttttttttttcttgaatatgtttcaagctggtgttaattctacaaaacagatgggcagctaaatcttttgaagttgctaaatatattttgagagcatataatttttatacaactaacgttcagtttatatttctatcagctaaactgttattaatatttgcaaaagccaaatgtcaaaagcatttaaaaatgtcaaaccatgtgaacacgattagggaagggtttcttgtaagaattggaaaatttcacctaacggtattgtctctcttatacccaggcacaaaatgccaagctccaggtcctgagcttcagggggcttcactccgagcctcctctagccatccccttccaccaggtgtgggtttccctgcatcatggggttatgcccatgcagagtctgtgcctcccctctgcctcatgatgttcagggtatgctgaaccaggaatttgtttccaaatgggcccaagcctgcttccaggacctgctgggtatgtgtgcgcacccaagatccaaaaagtagccaaatgctggcagcaggcatgggatgtggacagagtatagacatgacagctagggtgtacacacatgtgcaccccaggcccttagtggtaatgggaacatggagctgggggtgagagaagaaagggagccaaccaaaccactgggctgcaagctgggtgttaggaattggctgcccctgtaccaaatgggccaaaatggaactccaaggactatgagaatgccatgcttgattcggccttccaggtcatgatgaagatacattcatcaaggagaacacattttacatggcattttattttgctgacttggtttataacttgtatatatttagacccgtagaatgtgggctgccatttatatactcttgttctaggccttgtaaatattaggagtaggactgcatcagagttaggtttagaaaattatagacttgcaaataagagtaattgtattaagttctgttaatttcttcagcaaaactaagattgcaactaataatctataagaaagcagcatgtcttggaggtattctcttcttttattttcataaaacattacaaacatctgcaaaagtaaaggttccagtataagaaatgctcacatgcttgattataaccaactcaaagccaattgagtttcaacattaactcctgatcctccctccaaattatttaaattacatcacacaagcatatcttttcagccatatttatgtcagtatggataggtatgtcttttaaatatgtcttttaaaaaacatagccatatgttatcacacctaaaaacatgaactatatcaaatattcagggagtagacaaatattccaaccatatcttcagattgtctcatttgttttcttttttgcagtattttcaaatcaggatccaaatagggttcacccaatgtctcacgacactattcttgatctataggttttctccccacctcttttttccttccttgtactttatttgttgaaaaaaacaggtcatttgttccgtagaatttcccatagtttggattttgcagaacctagtcttatagtgtttcctataagttgttcattgtatctacaggcttgatgagattcaaggttcatttttttggcaaagttgcttcatagatagttttgggtatttccatcaagagacacaagatgtataaatgtctctctctggtatgttagcactatttctgatgcactatttcattaaaaattgcaaaatagcttctaattatattcttctttctccatttattagctaaaatttcttacaaagggaaacttctctccactgaggatgatttagttacaggtcttaaagacagaatgcttctttctcattgcttatcaattttgaaaataaaaagttggtttcctagaatcccctaaaggttttcctggggttgttttgtattattataagtgaaaggatttaaacaaaagctgacatgctttaatacactgcagttagtattcttattgatgtatgaattgagctgtttttgattggtggaagacttttcaaattggatcctggacattttaacaacagcctcagactgctatgacaaaaacaatactacctctaaaaatatgaccactaaaagcaacgatattttgtggatttctttttgtcatgaatatggatcccactacaagtgtacaagcatctgttttcaagtcacttcaaatgattgttcactctgtagatttgccatcaatcacaattgcagttagatttactggttttgctttcaatctgggggaattttaaaattagatgttatgttacaattttattaaacatgtaagtatttataaagtcaaatcctcaaaacaaggtttattaagagaaatttagcttctattcttttcccatcccatcttctctctttctatttaaagttaacaacttcttaagacttacatcattcttccaaatacatctctttctgtatgtttgtttacatgtgtgtggacatacacacatgtacaaattccatttatctggaggtaaattgaagtatatatgtgtgtgtgtatatatatatatatatatatatatatatatatatatatatagtgttcacacacacacacacacacacgcccttctcaacctggtatggagattggtgatttgctttttccggtgattgattattttgttttacatgaaaacaagattgaaatattgaaaatgaggaactctagataaatattttttgtaaagtagtgctatggaaatgatgttgaactctctaagtcaccatatttaaatctaccattcacttcaaatttaactgaagatcaatttctccaattgttaagggttcattaatcaagtaattctggaaaagggcatattgatatttgaacttaattattacgaagttttataagttttagaatgaacttgaaaatgtatgtctaacttttttgtaacttacgcaaaataagaaaaatttgtggccgggcgcggtggctcacgcctgtaatcccagcactttgggaggccgaggcgggcggatcacgaggtcaggagatcgagaccatcctggctaacacggtgaaaccccgtctctactaaaaatacaaaaaaattagccgggcgtggtggcgggcgcctgtagtcccagctactcgggaggctgaggcaggagaatggcgtgaacccgggaggcggagcttgcagtgagccgagatcgcgccactgcactccagcctgggcgacagagcgagactccgtctcaaaaaaaaaaaaaaaaaaaaaaaaaaaaagaaaaatttgtcagtcatgcagaacatacctcaagcaattaataaatacactgatatattctcaaagacactggaagaaaaaactttagtaaaacggtatatatctaaaactatatacttgctccaaacataaatattgcactgatgcaaacactaaatttttgagaagcttaacatatattaatttttgtagtgtacaacaggaagagaacccttaagggacagacagacctgacttaaatcctgattcagccattagtggctgtgtggcctttgcaaattgcttaacctttctgggctttattttctttatttatcaaatatggatgctaatagttcctcactggtctataatcaataagattatttgtttaaagcatgtagaaacacaactggtacaaggccagtgctcaataatattagctcacttgttcttttgtagacaacatacatagaagacagtatgaataatggttaagacctagggtatctgagttcatacaacagctacaatacatccaagcagtatgaagatgggcaagttatttaactcatgggagcctcagtttcctcatctgtaaaggagagaggctaagaatatcttccgtagaggactgttttaagaattaaattacatgtaatattatagttcgtctaaaaggaagggatgcttatttgtttcatttcactgttataacactggtacctaaaatagtgctggcacttggtaattctccttaagtgttaataaaaaataaatgagataactgttcgaatctcacgtatttcatgttactttcaagttgctgcttttcacatctaagagttctttcctcatgctctgagacttagtccttcgcctctccggattttattaaatgatggatgttctcactgtcagtgtaatctccaaggtcctggcctttcctgaactggggtttgggtgcactgagacggtaactacagccttactaccccactactcaattctttactcaagagaggctgcttagaaagtctgggtctgcagaatctcatagtgattccaatctattagatctgtaggatatttccggataacatatcatgtgctttggtgattgtttctgaaaaggcaatagacttgtaagtgttctatgtgtcatgcatattggaagtacactaaatatattactacttcactggggactctcttgacaataatgtgaattgctgagggaacagaaatcaatttttaaagtgtttctgacatcaaaggtgaccgctgggcttcaggaaaagagttcaaagtaagattgacttcgtgattgagatattcataagactcacactgcaaaggtaggttgggcattcttccactgcccaagatgcaagcgaatgatgcaggcagattccaagctgagtttgctgagataagggcctccaaggaactgagttccggcaacatgcattgtgagtacccataccatcaggtctgtctttgtattctgttctctgaacctaaaatgccccttcttcagttctctattaaaccctcttcacctgcacatgcttcaatactcatctcaaatgaatccatttctggctggcagagtttttcatctatcatttttttctccctgtcttatagcaaatattggatcctaaccttagttattttcacatgtaactcttttttttaccctacgatccttggcaacaggggatatggcttacttatttctgtgtctccacaccttgcttagcatagagccaaaccaattttttttttaattatcatacttcaggtttagtagtatctgcaaaaaaaaagtattctttatacagtattatctaagtggaaattttattttaaaattcaatagaaataatataaattagattttttttaaatctcaatatgatggaccaggttggccaaataccatccacagtgagggttattaaacggtagattcaaacagcagcatggtccatcagaaataatactttattcatttacttcaccatttattgtgcacctactatgtgccaggctaaaatcataagcagcttacattttacaaagggaagatataatatgcagctgcaaaatgccagcaagaaaaaaatataattttgtgataaaagtctgtaatcaagtgagtaaagtagaatattataaaaggcatcagggagatggtgaatttggagctggattttgttagctaaacacatattgtccaagccaacagcaaagggaaaatttgggccatcttagctacattaaatggctacacagtccatgtcataaatgcaattataagttgatggtggtctatgtatttggaaacactgactcaatcttcagcaaaagtggtttgaaaatgaaatgggaaaatacactaagcaagcagagaccataaaagaggcactaatgacataaacattcaaccttccttacaaactttgaaacagaaaaatggtggttgcccagttttttgttgttgtttgtttgtttttgagacggagtttccctctgttgcccaggctggagtgcaatggtgcaatctcagctcactgcaacctctgcctcctgggttcaagtgattcttctcctgcctcggcctcctgagtagctggaattacaggtgactgccactatgccagctaatttttgtagtttttagtagagatggggtttcaccatgttggtcaggctagtctcaaactcctgacctcaggtaatccacttgtttcagcctcccaaagtgctgggattacagacgtgagccaccatgcctggcccagttttccttttaatttgctataattgtatctatcccactggctcaagagtctcttaggtgcaatctcagcagggtgataataattaagttcaagaaattctgtaggtggcagagcatgtcaatctatgagaaaggatgaattctgcatgaaatacaattgcttagatcagtagggtaaatatagtttaaaacaatctattgtatatttcaaaatagctagaagagaataatttgaatgtttctagcaaaagataaatatttaaggtggtagaaatcccaataccagtaatttcctattttcaaattatacgaatgtattaaaatatcacttgcactccaaaattatgtacatctattatctatcaataaatttaaaaaacctccactttctattacagattataaactacaaaacaaataaatgatggaacagaaagagtgtgtgaccagaagtcagaagccctgggttctgggttggggtccacatagccatgtgatcataagcaagttacctcattttttaagcttcaatataatatttattattattaatatatatgattcgatatcatataataggctctccctatcatatgtaaggttataatgagaaatgaatgaaataacatagggaatgattttggaaatgataaaacataaaagtaaaaagtactgtcatttctgtaaccatggggatatcaatattaattaaaatgcttattataaaacacaactgctaaagcggttacagaaaataaacaaggaaaaagaaacgtatatttctgtcttgagaaaatgcatgctgtcagttgttactcctgcaaatgacaggtgaaaacctttggtcaggagaaatgtgcaaagaattctgaaacacagtttaatgaaaactacaacacatttcttttgtcagaaccccatagcttcagcatagctaattctctgcttcattcttaagaaacattcttaaaagcttgaggctgtttgttagcaacagatgtagacatttataaacaaggaccatcttaacagaattatttctcacgaattaaataaaggatcccaaagaatggttccaactgtttacagttagcacttagacttatactatgtgggaacagtgttcattaaatgcactgcctatggaccataaaggtaatcagaacaacaatctatactactgggactgctgcctctgcctctgccccatatgcaaaccttagagagattggtataaatgttatctgagagccataaaacactctcagaaagtaaactttagcttatgggaagtaaaccttcagttcaccaaattccatttagtgccctgcagaaagaattctgcaaagagtattctgaaagaggcaactcatcttttataggtgagcactccatcacagaagcccagagatgagaaatcaggtcttcatcctcccaggccatcacagtttataactctaagaatgatgactattatcaaaactttaaagatccccagaaatggccattctacaacctcccttggaagcaaatttctgtcataaacacactatctgtaaaattcttctatatgcttaacctaagtctagcagaattctggctgcatctttctactttagtgaagatattcattcattcattcttcaatcaacaaatttttttttaatgcttatgatggcaaaggttattggtgattgtataagagaggaacaggggaacaaacaatgtcccctggataggcagcgacctttaactctttatttagatcactattaggagcaatgtatgaaaataactgccaatttgtagaaaataccgatgccagaaaaacatggtgcccagtcccaagtacggtaatcaacaaaacttagactgtaggaaactctacaggtccaatattataggtctttaacgcataaaatatgaaggaaaaggaagggatggacagtaacctgtaggttcaaagaaacttaaaagacatatccagttgtttttttaacagatgcacaagactaaactgaagggtctgggaatgcacattaaatgatgacactattaaaaacacaggagggttattgccataaggtcacactaatagcttattggaaaaagataaaggttgaggctgagaagaggtacccagatgggattctgggtggccggcagagtctcctttcttgacctagcgttggttacaaagccattcaccttagaattattccttaagccagacatttatttattttgtgtggcttcctttgtctatgttttgtttttgaagaagcatgtatggatatgaagcaactagagctcctatacattgctacattgctagtagaaatgcaaaaaggcacagataatttggaaaacagtttggcagttccttatggaattaaacaaatgcttactatatggctctgtggtcccaccctagttatcttcccaaaaggtaaacactctaagacctggacatgaatgttgatagcagctttaatcacattcactcaaaacgggagggaatccaaatgtctatcaacaggtgaatgaataaacaaatagtagtatatctacataacagaatactattcacgaataagaaaatgaactactgatttttgcaaaaacatggacacatcaaaaaagaatcacacaaagtcaaagaagccagaccaaaaagttccatactttatgacttcgtcatttataagcctttctggaaaaggcaaaactataaggagagaaataagactagtagttaccaggggcttgggagggaaatgagaacaaagagggagggagagaactggtccaggacatgaaaatattctgtattttaattgtggtggtagttacatgagggtcaatgattgtccaaacttatctaaactataaacgtaagaaaagtggattttctataaaccacaccaaaaaataaaacatttattattgaaagtagaaatcaattcagttttcagttttaaaacattattctgtatctcacacattttcttaaaggaaaaaatgtgttggagtaggaacagtaatgtatcagaagttataatatgttattaaaacatatttagaggagagactaaatcattggtatttttattgatggctctttcttcagagaaattgttaaaaagtgaaaacaattctggttgtcataaagttatctctgtttagactttttaccaaaccagttcaaataaatcctaaagtggacaacatcagagccaagagcaatcttggttatatgttcacagcagagtatcttaacttccttttgccagccaagttccccagtatttaattttggctgttcccaacagaaatttttcatctaggctcggcagttttctaatctcaacttctccagagtcaagtaaccaaaatagacatggccaaaacccagtcccacagagcctccctgtgattacagcatggacaataagacagtctcctccaagacctcaacataaaactcattgttagaatcttcaagaaggcctggttacaaatgtgaaattattacttcacccaataagtaagtacatttcatttctaatgcagggccttttaaaaagcataaaaagcattataaaactataatgcaattgaatttactcatgttacagatgagcaaattgagacccaaaagggtcaaattacttaaccagagttattaagctacttagaggtacactgacaccaggtcctggacaacccattaaataagatagtgctctttgcaatgaaattggaactatactctgtgttaatactgttttctctacagggatgaataataggcaacatgactttcacgttgtctactcaaaaacatatacctctttaaaaaaatttaagaagaaacatgtgaccatttcatcatttattaggcagaaagagaaatacaaaacaataaagtaatgttcagctttcagtaagttagtatttgcccaaggagccgaaaacagcctttctttccagtttgctacataattggttttggctttcctttgcattgcttaagggagagcttacatgctagatcactaagatacaaacttctgacaccaaaatatgatccatattatgttatccaggcattttaaaagaggtcatttaaaatcttttcttccatctgttgtaatttgaagaaaatttatccttgaaccaatgttgctttaccatcttcaacttctggtagattcacacagagcagcagatgagaggccccaatttttatgaaaagtctcaggcagaaatattgctgatgatgtggaaatagcaattccaaatcaacagaaaattgccctctgtattcatcaggaggagcaaggcactcaggagagccagcctctgagacaggtcaaagttgacgaacagtcagacatgggaacaagtgcagaagaggagaagagctctgtgctgatgcttgtccaaaggtcaattgacagcttttctcatcttgttacattttcctccttctaaagatgcagagaaaatgttcttttaatgtaccagatacagaagcagaagggagtacatgggtagaacatttaagggcatattatcctcttcaacacacacttctatgccaggtgcctacagtttccaaatgggcagcagaaaatgaaccctaggattccataaagtctctgagaaccgataatgtgaacagcaatgaatgaacgagttaagcggtaaaaccatctccatttacgactccttgaagttcagcatgcagcagactgcacttaagcacagcaatcaactgtgataggagaatccccattacagtaagtaaagaaatagcttcaaggctgtggatgacggtgccaggggagaaggtcagaacaggtgcaaagaaatcctgaaggtagggagtgaaagcttgagttccatgtgggtgatttttaactatcctggtcaaatatgggtggcaaaccttaattattcccccttatttagaggtacaatgactggtgtaaacacacaaggaacatttcaaggctgaagaggcctgaaatcaagtatctttattcctgatatttgggttgtaaaatggtttgctaagaatgtttacaaattatgtccgccaggtgctaaatctcccagatcaattttaatttaaatcttcaaacacgctgcagcacagagctgtgacacaataaaatgtgtagtattactgttgtcactatgcaatcattaatttcatctgactattcatgcctcagcataataaaccattaacaagtatgaagtctggctgttctgaatctggacagaagtcctctttatttacagctaagctataaatacggtgttttgttcatatatgtacgtaagacttctctatctaaattctactttttcttgagggcataaacggtgttactaggcacacaataaaagtgtttgtttcctgttgaaaatagcagctttcattactaatctacaaactgggcctggcatggtggttcaccagcacgttgggagactgaggtgtgaagatcacctgagcccaggagtttgagaccagcctgggcaacatggtaaaactccgtctaccacaattacaaaaattagccaggcgtggtgacacgcacctatagtcccagctacttgggaggctgaggtgtgaggatggtttgagcccaggaggtgtaggctgcagcgaggtgaggctgcaccactacactccagcctggggaacctgagccagaccctgtctcaataataataatcatcatcatcatctacaagttgattagattatttccaaagggaccaacagagatacctttgcaaatcctgcatgatatgcacaattatatatatgaaattggtactctgtagagttgcttatctcctcactttatcacctaagtgatcccattactctacctttttttttttttttgtaaatcactgttatttcaactcaacgtaccccaccctaacttggagacaatattcctcaaagtgctcctctaggtgaatctaactgatacacaaacacttcattacctcaacatggataataaatccaggggtccaaacagtgattgtctttacatacaagggaagacagttccatagtctcatctacagcattcaccttggctgtctggacaatcacaattcaaacaagcggttagaggagtggggagagtgggaagaatttggaattttagatagttacaaagctaacccctcataaaatatgcccagccacacagacaatgggttaaacaatcactttcacatctggaaagcacctttgatgtatattgccaaataataagataaagtggcagccctaagatatcaccacctgcctctaactactaccttattgaagtgctctctcaactgtgaaggcttaatttgcaagtacctttctttatccatatttacattaaagaatgtaaatggtctgaaccaagtttgttatgcctgtctgaatcaccctcattgcaggcaatttctgatgtatgagcttatggctgattaggtaacctctggtggcatatccaatttttttttattgcctaaatttggaccatttctgatcattatagcctaatcagaggtcaagagggaagaacagattgtggctgaaggtttggtggtgatataaaaaaaaaactactcattcaagcatttgtatagatttttatcacctcagcgatcccattactcattaatagagacaatcacaaatgttcaggcttgcctggtgccttcaagccatcaggctcatcacacagctgaaactgcataaaattaagccatggaccacctctcctgaatcactcatcctgacacctgaactctacttcccacgtgtacctaactgtcccagcatctaacttcattctccgcttctccctccattgactcaccttgttactgaagctgagactgggaatcccataactactgtttagagactcccatgcctacaaggccatcaaacataccaataaaacacatcacccagcctgggccaggcgtcagcatcttatgcctctgtttcccacattcatagtattagaaaagcacatgtatatatctggagattcccatgaatctgaagtagaatggttgccctgagaactttaagcaccagagtaccggagtagttcctatttcacttgtgatctcttagacatgacccagcattcttattccatatattaggaaattgaaaaactgctcaactttccagatataagtgacatagtgaaagcagcagcccttgcaagaattaatcctaatttgcaccattttgggccacgtctactgtatccttcagtgtcttctataaagtgttctatgtgatacattctattatgaatttattaacagagataatattcctctctttaaggagtagtagcctttggccatgagataataattacatattacttgtttctttttttcttttgatcttgtctgccaggaatcttagagctaaattacatgctcatactcagaaaacttgttgggctatgtgaaggtgataacttgccacattctcctttcatgacctttattttgtttttattttatcagccctattgtaaatctaccttttattgtaagccataccacattctttgagaaagtggttattagcttagtttttaaaagtaacctcagcccatgaacaatgttcaaaagtaatttcacatcccagatatcatcatgcacaaaatgaactcattggcccaagagaaaaaaagaaaaaaattatgaatataaaggtttctaattcaacagaataatttatattatggaaattatttagatgaccatattggatgctaaccccgtccaagggtgatgcaataaaggcttattctataatattgagaatttttcaaagacttaataagattatttaaacataactagaaatatcttaaaaaccaaagtttaaactgtgaaaggccatcagaaatggttcagtaggtctactcaaattattgtgtaattatctgttacatatgcttttcccctccatgtcttttactgatttgcattagttctctggctgtaactggacttgaacttttcagtttcaatgacactttacatgagaaaactaattataataggataaaagtccttcacaaaagaagtatgtaaaaaccaaccactacttattgtacacataattatcttctctttcagcctaggatgtagtcttggctcttgtgtaacttaaatctgtaggggattggcatctgatttacagcagaagacccagcatcatatgaatataatttactatgccatgtgtctcctgccacctaaatctatagcttgaatatagagacatctcaattagacagtgcaaagagagcaagatctgcctcctcctatcctgtgccattaaaacaaccaatattaccaagcagtgcttgttttaaattcactttggaggggtggatctattattttaagttggttaggagacacaaagggagagttgccatcaaactgaatgaaaaatcgagcataaggtgatataagtaatagcctatgaggggtgggacatgcatttattaaagtattgattggtgtatttctatagcacctgtgtattatcatggacttgaggagttgaactggtgttaaattataatgctgacacacaggagtcatccatccttcttgtcctgttcctccatgaactcctacaccaaagttgaagcacatacacagtattggccataatgaggtaaattatctggaggctcaactgtgtttgttctctccctgcaacacatctaaaaattaagctgtcattataaaaacttcataatgacaaagctatattatttatcaccggtcacagtgttctccaaatcctggtgaaaagttaaagacaagacccacacagttttctcatgacgattttagggcaacttctcaaacatggatactgcctgggataatctcaggagagaaaagtgaaacaaattattttcctgattttataaatggtgaagtatagaaatgaatgcagattgtccttcacaaggttcctatatctggtcccaaggctgtaaatgcacagttttctgggggattcctcccatggaattgaagggattttaacataatagtttgaaccatcacctaccctcatattaactataattggaaactgaaagattccaactgctagaattaaatctaggagctactttttcagaatcttcctttcaaattctttgaaagagagattctagtgatctctctctctctctttttttttttgtttttgtaatggaatcttgctttgttgccgaggctggagtgcagtggcgcaatctcggctcactgcaaactccacctcctgggttcaagtgattctcctgcctcagcctcccgagtagctgggaatacaggcacctgccatcatgcccggctaatttttgtgtttttagtagagatgaggctttgccatgttggccaggctggtcttgaactcctgacctcaaatgatccgcccaccttggccttccaaagtcctggaattacaggcgtgaaccactgcgtctggccacattcaagtgttctagtgatatctttttaaggacagaaactcactgattttttttttttttttttttttactactccttagtgtttcctctaagcaatgaggaagagtttattgaatcattagagtcacatactctctctttgtcttaaaataggattgcgatgaccactgaaatctcatccttttggctggccttttttttttttattattatactttaagttttagggtacatgtgcacaatgtgcaggtttgttacatatgtatacatgtgccatgctggtgtgctgcacccattaactcgtcatttagcattaggtatatctcccaatgttatccctccccgctccccccaccccacaacagtccccggagtgtgatgttccccttcctgtgtccatgtgtgctcattgttcaattcccacctatgagtgagaacatgtggtatttggttttttgtccttgtgatagtttgctgagaatgatggtttccagtttcatccatgtccctacaaaggacatgaactcttcattttttatggctgcatagtattcaatggtgtatatgtgccacattttcttaatccagtttatcgttgttggacatttgggttggttccaagtctttgctattgtgaatagtgcctcaataaacatacgtgtgcatgtgtctttatagcagcatgatttataatcctttgggtatacacctagtaatgggatggctgggtcaaatggtatttctagttctagatccctgaggaattttggctggccttttaaaggacaagcctactggctgcaaagccaccacaactcacttgaagacccttaggaaagccatcaggaaagaaaagacaaccagtttcaataaagctcatgtcaggtacaaatggaaagtttcagaaaattggtctgaatgccataggatgcttcagtcagaacagaaggtctaaatggttggtaaattagctcatcaaacacaacagaagcttactcaatggacattcaatccaaggtgttactggtgcagagagagatgcacctcaggaagcaatctgctcagctaagaacaatacctggagaactgctgctgcaagctacgcatctgaattctgttgcgttcagactctagggtcacctcctgcaaccgcttctcgctttgaagacgtaagtgtctctcctcttccagttcatgtatcagcttctcatgctataaaagacacaaaggggatgacttttaggaaggtgtttatgacaaaaataagaaatagctggttatcaagtgataacttgagctttatatatatgaatttcatcctttgaacaaccccacgaagtaggtcctattcttaatctcttgttatagacaacgaaaccaaggatcagagacacctaagtaatttgtgcaaggtcatataaaccagaaggtaatagatcttgactcccaggtgacttaattctaacacttgaataatttccactaacccagagagcatcctgtgaagaactatgacccaaaaatactattgaatgcacaataagtcagataataattagtaagattattacctgttcagaattatttcatctcttccatctctggtatatccttgaaagagaaaattactacttttatagaaggaccaaaaatttcaagttaattagaatgtgaagctgatgagggtgaggctcaagaattgtttttcattttgtccagttaggtcttcagatataaaactaggccaagccacccactgtttttataatcctagataactagctcatctcacgaacgggtatcagggactgaaagaggaactggatgacacagaatagacggttcagcagaaactcattcctggaactggtaaaaagcacacagctcagatcctcctgatagcactgagtcagctacactaatgtctttgttgttttgtttttgttttgttgttgttgttgttgttgccttttttaaaaagcatgccatgctgttattgttactgctgttactacactaagcattttgtacacaggatatacactctatgatgaaaactatacatgcaatgtctgatcatgagggacatatatacttaaaaggaaagaaggcaaacagtgacctctgttttgaaataaaccaaacactatgactgtgtaccatgcactatggattaaatatgattcatctcatgtggcatattcacaggaagtgatagcaatgacagattttctccagctctaactcatgagaaaaaaggcattctgaggatcatgaaagaaacattagactagaatctagatgtgaatcctgatcctctaaaaatacttacacatcctcctgcctctgtacctttgttccagcgtgaaaagctgcctaggtctctcggttgaaagcctagggttccttccaggctcagttgcaagccatgtcctctacaacttatccctcatcactgcatttcctcccttccctgaattccaacatcacctaccatctttaccaccctttaggtctttactttttctactgttatttttcatgtgaatttatcataattctccacctggataaatatttgttcaagatgccttatgtgcagatatattttacatttttagcacattacctaatatgcagtagtgctggaaatatatttgtttattgattctgaagctggccttttgcttactcaggcctgactttttgatggtctacttttaactcccataatcagttacttttactgaaatcagaaaaactaaaatcaaaattaaaatcaaatctttattctgtcactttggaaaatgacattctggaagcgctggaaagaaagaaaaatgtggttgtggaagataaatgggttaattaaagttaactctttacaaaaatggtcaaaattgcaaatttcatgttatatacattttactataataaaataaactctttatggttatatacacaattgacattcctctttttattgactgattagactaaaagaaacatggacaagtcaccaatactacagaatttggaagatagtgcttcgattccagaaacaggccaaaaaaaaaatgtacgctaaatagttcaaaagtacatgctacgaagaatgtgaagttcacacctgtaatcccagcactttgggaggctgacacgggtggatcacgaggtcaggagttcaagaccagcctggccaagatggtgaaaccccgtctctactaaaaataaaaaaattagccaggtgtgttggcgggtgcctataatgccagctactcgggaggctgaggcagtgaattgcttgaacccaggaggcggaggttgcagtgagccgagattacaccactgcaatccagcatgggtgacagagcgagactccatctcaaaaaaaaaaaaaagaatgtaaagttttgcagagaaaacagcatccctccttccttcaaaagcaaagaatgctccatagattcactcactgccatatcaaagagtcccaaaaacatgatcatgagagaaccttttccacatgaataatcttttctcttcaatttatttatgccttttaaaacatgaaaaaaaaagcacacacacacacacacacacacacacacacacacaaaccctgataacacagagaaaattctaaggaattaagactatgagggcaaaagctttttactaaaatatattcccttcaaatgacgtgtatttctattaatccatcaaaacttgacaataatccacacctactaaatatgaaaaatatttgtacccaattttttttttttttttttggaggcagagtctctctctgtcacccagactggagtgcagtggcgcgatctcagctcactgcaagctccgcctcccaggttcacactattctcctgcctcagcctccagagtagctgggactacaggcacccgcaaccacgcccggctaattttttgtatttttagtagagacagggtttctcgatgttagccaggatggtcttgatctcctgaccttgtgatctgcccgcctcagcctcccaaagtgctgggattataggcgttagccaccacgcccagcctgtacccaaatttaaaaacaggctacacatagaaaaaatatagtatcaatagattggctattttttttctgtattcgctatattctggatataaattgatctatccccaaagtaattttaatttgtctcccaaatgttggctctggatctttcccagcagaaagtgtgaaaggcaatgagagatggagaacagttgctgttatttacacaacgccactaggtactgaagagcaataagtagaggacaatatcctgggaatctgggttacaaatctgacaggaccacatttccacagcaacagctctctttctgcagagccactgagctgggatggcttgaagacacctgcctaggagagcctcatgatgattttcaaagctcctcaatcaccacctttcaattcttcccatgttcttcgagcaagatgctccatgttcgtcacctcttccctttctctttggcttctcttagcaaagatctcaaatcgctgcaccagaacacaagcaacagctcaaaggctgagtctaagcagtgacattacatacatgttcaacaaaacttgccagtcacaggctcttctttccctttacagaggtgagctttgttattagtaaaaaggtaggtttccctgtttttctgaagaaaagctgtgagtgggttaactttcaactctgttattcgttagctgctgtctctaactccgaaatgagcaaactctgcaaaaaatatcttcaatctggagaatattttacattttacaaaatgtgtccaccttcattactgtattcagtcttcagaacaattcagcaatagtggttattatcacctccatctaaagataagtgcagaggactgaaaagagaggcaggaagcttgctctgtttccatggttagaaatagcagctctggagctagaattgagtttttctgaccctaagtctcccacttttttcccctactactgtcagctctgctgtaacatttcttttaaaagtgctaatttgttccaatgcaactgatatgttgtgaaaaaatttaagcatgacacaaatcttaggtttgccgattgcctgatttcattcatgagaaaaattaggtgaacacagaaaactccacccagttgaactgcatcgaaacacacaaaacacatatttcaaacagacctcagtccactgtgtgcattacgagccacaaccatccacatgtggtgtttacaacttcccctccaatttcagacagcgttccttccaccacttcacagtaacttctgaactgcatccctgttgatatccacttccacaaaaaactctttcaaggtaaagcaccatatttattgtagtatttatgtattttttaaccactgaacacatggctgccaattgtattaggttcctacctttttgtttttagtgtgtcactgacaaagttttgagtatttttcccatagtcctgtttcccccaaaagctttgtggttttcactgtgtggttttacagagtgcagtaattttcagtaacacacatgttataccagagctgactggacaccatggtggagaaaaagaagtccaaaacaagagtggaattccaaaatacttttcctatttggacatgagcaaagagttaagttctagacaaagaatcaaacatacaaagagaaagacaggtatttcctccatggttctacagaatgatcttgtctatacctcatagcctacacatagcaacagagctcaaactgagccatcctctgattaaacctcaaatgcaggagattcctccatttccctgggtaatctatgtttctgaccttttctcctgataattttgtaaaacttgcttaaatcattaaagtatcaaaaggtcctttctacatgcatgttccaaggaaatgaagcaaaatctatatagattctgataattctctaatttaatagagaactgtgcgtgtaaaagcagctatgtacccccaacatggagtcgtttacttacttggcccacaaatgtttactgagtagctgctatgtgccaaacactgaactagagatggaaaccaacaatgagtcaaatggacatggttcccggcttcgttagacttacagactaatggagagggctggcgctaaataaacatcacacagataaatacggcagtataaactgattgttaattaagagtatgctgaaaggtgaaagtgacggaaactgattttgtttggtaggtcagggaaaggcctctgaggaagtaatattgaaactgagacctctgtgatgaccaggtgctaccaggcgaagagaggggaccagcactgcaggcagagggagaggcaagtgcaaagccctttgtcgtgtagggagggaggaagagaagcccagtgtggctggaagctggtgagccaggggacaggagtggcataggacgcaggtggaaaagaataagggatagaccacgtaggaccatgaacatgacatgacagatttgggactgtagcctgggtaaaatgatgactcattaccaagggcttaatcaagtgaggaagatgatttcagatttggcaaagttcattctgactacggtatggagaaagaactaacaggctaaattatagaatgggaaaacatttatataaatatttaaatatttaaaataaatataataaattaaataatgctaccagcttttagtttgtaccacaccatttactagagaagtggttttgaacaagccacttaacttaaaacttaactgctttaagccagtttcctctgcatactggggacggtgaactcatccaagccaatttcatagtatcattgtgaataatagatgaaataatgtatggtaaggcacttcaaaaactcaaaagtcctatataaaaataaaatatggctaactaaaattgtacagcttatattgtctaatatacttcagctacttttgataaactctgtataacatttgtctttaataaccattacatattaaagataatcatagatatttcaaaaagttcaaaaatgtgtgtctaagcagatcatacattaatcttgaaagaaaacacattttaaatatgattttgatgtaagaatggagaggataacttaatcacaaatgccatctagaatatatataaccctgtgtttggccttccctaaaatacattattttttattctcatttcctagtatgatttcaaacagatggcttgatgtatggtatgagaaaacttcagaatgaaattaaaatattaacacttgattcaaatatggaaagccaataaatacctctattctaggtctaattatagttggtgattctcattatatcagtgggtggtaatactgccagagttaaagacaattcaaaaatatgaaaaagaaagaggaatttatttggcttggaaattctagcaccacattatgtggcatatatttgacgaaacatatcaggcataacaagaggcacgtcccacataggctccaagccctccgtgagtcctgcctcgttgagtgtcatgaggtaccagctcatctcaggtgtcctatgctggcttgatgtctgaagatacatgataattgagaagtaatcgctatatgtctgtttcaaaagatttcctgaaatgtgtccaagtgataatattcgaattgagtcatactttatgaccaaagaatcatggggaaaacattagtactcttggataataagaggatcttaaggtaagaaatgaatagaggccattagagaaggacaaagggattcaatgatattcctgtatattgatagaaaaacacatgagctcatttgagaaatgtggaaactgagaagcaagctaccaactagaaaacgtgcccagtcacaggtatctccacgtattcatcaaccaacatccaatgtgcactcaaacatcttaagaattacacggagacccagaacaatccttttaattctctccctacctattgagaatctaaattgacacctgtgttttttcttcagaagtccataagccaaacacatcagcagaaaaattaatgtcttcatgaaaactagtttttaatgggaaaactctattaaccaactctgtcaagccagtatgaaatggatctaaattaagctatagttattacatctaattgtagccttgtttttgttttgcacacatattgcaatacagtttcaccataaagctctctgaattcaatatccccattagttatgaaagatttggtcatcctagaagcagagaaacagataaggaacttgaggattgattttttaaaaacccgtactcttggctgtaacagaagaatcagaatcagattttgagatgcaaggatagaaacagccaagtatatatctgcagtgctgataacatcacccaagagagacaaagcttttattctaactaaaaaaagatgcagagcttggttttgtgtgtgtgtgtgtgtgtgtgtgtgtgtgtgtgtgtgtgtgtgttttggaaaagaaaggagaaagggtgagataaataaatacagaagaggagaagggtggggtagagggtagaaatttcaagggcaagtaagacagatgggcacttggatggatcttaaaaatgtcctcaatgctagacaggagctctataacagaaatggcacaggtgaagcaccccatatgactaaattttcttagacaaagattatatatgtccttattatttagcaaagggatagagatgtgaacttgatgaaaggagtttttccagggtgggttgtgaagaaaagcaagataaaatgaaggtgttaggaataccgctcaaaatcctaaggaaattgaacactcgaacaaaggattcttagcaaagcaattttacttccgcgcagaggggtgcctccttggccagttgccatgagaacacacctgaacaaaggggcaggagagcctttattcctgacgcaagtcctgcccctgtaccctttccccattggctgaggtggggtcgtacaatctaatcttggttagctaaacatttgattttttttagatggggtaggcacgtaaaagaaagtggagggaaaggggaaggggtgtctgtaatgagctagaaagttagtcctctttccaaataaggaaaggagtgtgagctggtactgatagtgcttggtactgtggtgtgcataggcatctatcaaaggcaaaaaggaaaaaaaggagaaaaagaagggggggtactatgaattaaagaataaaagattgattcgattattcgaagagaaacctcatcatatcccacaaaggtctggcacgtggagattgatatgcactataaagtcatggtggaaaaaattacaacaaattttgggatcctaccaagagaaagtaagttgtttactgcatagtcaatggtttttattatttatcaactagggctacaaatgaataataaaatggtaacactgtatttacaacaaaaagtaatacagttttgcttttaatatcatcctacagcagaaaaaaaataggatgaaaatttatatattgatcaacttctcacatttttcatcagtctaagtgtcattttcacatcatgattcctacagtggagaaggcatgaggctaacagactgggctagagtttctgtcttcccattaacttgataagtgaccttgggaaatatacttactgtctccggacctacttctaaactgctgtagtaagttcttataattttatgttgccttggcctccattttaaatataagttggattctctcataccagaagaagggctcagtcatccttggcagaatttccagttctacgcctaactcacactcctagttcctcaatgtgttcaattcagatatctgcattacacagttgctcactacgggtcagctagacacagcctgcttgactggccctgctgctcctaccccctgcatgagctgtgcagatacgccacagtgactaaccctcagtcacagtgtggccacctggaactcacacctgttgctttaaactcacgaattaacattccccataggaaacctgtttggacaacaccctggatgccagtaaaggcattggctcatggatctctctctacatgtgctcctagacctccatatgtgtgaccctcaggtgtatcacataccccgagggcctgtaaacaagaaaatctgtatttccctcttgtgtctcttctaatcattggaaggttccctccatctggaagattctaaattaacactaatgctaaggtcccttccaactctcacattctatacagcaatgaaattagccacaaccatatcaggaaaagcataagcaattacaaataacattagtggcataaagagattaaatgcaatgtctacaagtggggtgtgtgtgtatacacatattttgggggttagtgaaagtataagtttcacttaatactgatgaaagtgactggcatccttgttttggataattagtgggtgaagatttaagaggcaaagggcacagtttttgggttaaagagagccaggcaatgttaaaacaatgatattgcacattacacaattaggaagaggagtgataaaatagacacaccaaaggcattggttttaatttgattctgaaatgattgggagtatcagtagattttgaggagaatgacagaatctaaatgatgtttaatctaaatctaaaggatgataattcttcctcagagtggactctagaggtgagatactaccataaaaggaacaatttcctcactgtcattcattagcaatggttccttgggttggaaaaggcctttccacagggttttctacctcactgactttatgacttctataagcttctcagaaaactaattcttctcaagtctttgaatatctgatgtttacagaggctgaccaaggaaagcaagacattgagtaataacccaggtaggtagtaagcttgttatcaatagtcaactgcctaattcagactctctttcccttacccgaatcttttccttgagtttattcagtcaaaaggctcaattctcagcttgacttagaaaagagctttatttactcaaccagtgggtcctttcataaaaagtcaatgactcattcttctcccctggtcacagatctttctttgttgtcatgttaattgatcacaattaacagtagctacttattattctatccccttgaagttttcagaagttgattttattaaatgccttcatacttgactgaagtcttaaacattgtttccttttctgtggagacagtatattctatgcaaagaagacacagcatttcaggttttttgtttttgttgtagcaacttttgcttccagttctgtaccctgaaccacatgtgcactttcagaatggctacagatctatgccccattttacccccaactctgttccttttctgtctgtactccacaacaatcggtgaacaacaagtgaattctctggctagtttcattttcatttcaaacttttggtccctatgtttctctcgttgttctctgttatggaggattccaagatttttcatcctcccatctacgctctagtcttgaacttcagctatatttactatgaaggttaacacctgttctgcctcaactctgatgtctctcttacttcactgcccgcctaatttatggtttataaaacatacttgtgctcttgctttataacttagctttatacagaatatataatgccacagtctttgctgtttcacatacatatgacgtattaatcattatataatgatatgtataatatatattatatataagtaagcttgttaatataataaattatattaacattaataaaatgaataacaaattatatacaaaataatatattactatatattcagtttaatgtatattataaccaataatatattattccctgtctcttcaaagagcacactttccttcaggcagggattaggcctcaaacacagtcacaaaaccccatagaatattagcatattgctgagctttccagaatgttcaatacatacttgttaagctccacatgaatcctcttgaccccccacgaccttagtgggcagctagctctaggtttataaagtttctctcggtaacaacttttagtcttaatcctgactgaggataatgtgatgagattttctctggtttagaaactccacagatacatttctctctgtcatcttctttcccttaccattgccttctcccaacagcccagggattgcaatcccaacttcatattcacatctcttaactgatgattcactttcgctcaataactattaagtcaaaaatttaatttctgagaagatgtgcaggagtttccaaacaaagccatttataattctatttttaaggatagtacattgtaccgttctttttgttcgccctactagactgtacagagtagtggaaaggaaaaaaaaaaaacacaactctattcagactaagaatcctttttatcctgtagctggaatccttatattccttccttcagtgaatgggtataattatgtgtattggaaattagagtattcgctataattatgcactcttttaaagtgggagaataattataatgtctacaaccaactgtacaaggtactactgaagcttttgttttaaatctgccagggaggacctcagtaatgattaatttcttacaactactttttattcatttggagaacatactaggaatgccttcacacttcccgtttcattgtggaaagtttctttaaacaagaatatttctttaaacgaagacttgagaacaagtgggttggtttttacatagccagcttccattatttcatcgtagattatatgagaaacctaaaaattttaaaacaggacttttagcagcttcccttatccttgttagcaaatgcaaacttttacattttatcatgctgctaaaaggtcagctacaacatttaaaaactcaatgtggaactaatcacaagctttggttcaatgctttagtattttatttcatacaattaccaaagttagaagaaattgaaagcaccaaatattaaagaattagagattgtgttatttctgggaggtaaggttaaacagaaatatcatttttatgaggaaatcattaaagacctataaatgagctgagtgagtgcagttaatctacagaaggggaaaacatatactcttaaaagacaaccagagggcctcttttgaaagtatatttaacccttggttaaccacatcagtcaaggagaacatcacaacagacaatctcactttctcaatgatcgacacagtcaccagaggaagcaaatggaaaacacagtttcacatggtctaaatactactcacaaaagataggccagtgtggctacaattactactattaataatagaatacctgcctggcccgttgttgggtatagaaaagctcacagaagaaacgcttacatcatgactgcaggtcttttgcatgcactttatgtgagtgtcagaaattgtgttctcaggtgccctttttgtaatctcctggtctctccccagtttccactcctggcaatgtttagccctttctcgttcagaagtggtctctcctggaaggctttgtcagacttgactgaacacagcaagagctatttttccacatggacacattaatatctgcccctttctagaggtcttatgatcaaagggaaatgaaagtttgcagacctggaagggtgcttgaggtcactaagtccaattgaggtcctaaaagataccaatttgtccagggtgatccagcttaccataagcctttgtcgctgtggacagagaagattcaaagatcctccaaaatctccctttccaggcagtcaacaatagagcaaattttcaagactttggcagagttttgcatttggaccagttagatttatatgtaaaactttcatataaactactttcctctgcaatatagacctttttataagctcaaaattaaactgctgcatgaagatggaaaagtgatttggcaagaccataaaacattttcatcctttttatattagtgtcttgaaagcccttctagaaaattttgcctccttcttcagaagacaacaatattaaaaacgtgttttttttttaaccaggccttgaatgttatgtacattgctccacaaatgtacatttttatataggctaagactctatttatgatcaaagaatcagattcaacatgcacaaagaaaatggttccaattagtgagagttacctgccatcttagtaccactgtcaatcagaacaggtgtgttattacaaaagtgtgccattacacaggttataactcatccacgtgcaaatacctacaacagaggctctccacctcttaggccaggaagaactgcaaagcatccacaaattacaaacggttcagtgtactgaacatgatgtattgacaggtattgaataaataaaaacacaactgctataacacagaaatctgtggccttattttttatggaaaaaggatccatgtcttcataagattgtggccactggcattaaatctgaactacagctagtgccagcagccctactgatgatacgtaagacagggaaacatgtatgtacaattaaagtgcacctccttattcacagagaagtcacaaagtaattccaggacaaataaagtgaaggaaaataagagagagagagaaaaagagagactcttcccagcatcacaaataagaatgataatgatgaaccctggctgagagttctaagcccttttcacatagctgccactgaacccttgcaacaatactagacagttggcactattcccaaccagattttttttttttaagattatgaggctaaggccacagtaagtaaatagcagagccaaggtttgagcccatgcaatctgattccaggaacctagggcttgactgcctctctttacaggtatgaaggagtttctttcctggtctagtaaactttcatcgcaaccagcaaaccaactgatgcatttaagcctctccctttccaggaccttgttagagattgtagggtatagaagagttccaagagatggtctgaaaaatagagagacagagatggtctttgccattaaaaatattgtaatcttgttaggccaagattatcacacattcaacaattagctagtaaagtatgaattatctagagcaggggttggcaagtttttctataaggaaccagagggcaaacattttaggcttgatgtgccacacagtctctgttgtaatgactcaattctgctctggtagcacgaaagcaggtatagataatacatagactaatgtgtgtggatgtattccaaaaaaactattacaaaaataggtagggagggaaatagctcagccatagtttgtggactcctagtcaagattaccagctataacaaaaaaataatcaattctaatcattcattttccaggaggtgacattccctttctccaaaatgcataaactccctagaagccatggggttgcagaactgtcttcttactgttaagaaacaaaaacaatttgaaacctcttccccgaaacttaatgaaactgtagctactgtcgaaaatgaaaaaattaagtgtgtgttttctagaaaggatgaactttcagcagtgctgaaaatcacgtaatatttgtgcttgtcagtgtgctagaaacaaatcttttatctatccctgtgtgattacgtctctgtacagaggcacctgcgttgtgttatacatagaattatattttaccctttggtgttgaaccattagccagtgtgtcttcttattctcaattaggaacagagttcctcccactggagggagagcagaggctctgcagtcactcgctgccgtgttagtgttgttagagattatacaagtcactttaactcaacaacttacaaagggtctacattttacgtcaaactaatctcaacattagataattttgaatactggtcataatatacatacaggtagatgataatttagccatacagattaacattttgttcttttctaacactttgagagcctatgagatttaatgttgacagatgctaacacctttaaatgcttttctattttctcagatgctgaaataaaattttaattttattatttaaatacatttaatttattaaaaacaagttggaatatacagtaaggctctgtagtgcatggattatacaggttgtagcagaaaaaaaaatctatctccctctctctaccaaaagttttatatttactatgtgctatttaataaataagttaattttccaatgagaacacatggacacaggaaggggaacatcacataccggggcctgtcgggaagtaggggttaagaggagggagagcattaggacaaacacctaatgcatgcggggcttaaaacctagatgatggattgatgggtgcagcaaaccatcatggcgcatgcatacctaggtaacaaacttgcatgttctgcacatgtatctcagaacttaaagtaaaataaaataaataaataagttaatttccctgcacaatcaatcattaagtcttctacctcccaatatatgagctggcctaggaggggaagagtagtaagtttataatctaaaatttgtgtacccttgggtcgtaacttttaccaacaacttaactctccatattgtgcatgtagttcatattttaaagacttcaaaacttcagacgtccttttgtctgttacacattgattgctgttaaactaaatgtttttcactctgtaatcaatactttcttacaaaaataagcccaggcattgacaaacaactctgcagcacattgcagctttcctgaatgaaaaactaccacccccaagaattaaaaaagattgcatcgactccagtgcttattacaatttttacaagcttcttacagctgaatcattccactgtaacaagactttattaaattagacagccattgaatcttaagctttctgagaataacaagtaatatgcctttgtcctttattattgtttctgcaaccatactgctcatgttcatatttacatcttctcttgtgatgaagttattaaaaagcaacatctagataaaaagcaacatctagataaaatgggagggaagcaacatctagataaaaaagcaacaactagataaaatgggagggaagcaacatctagataaaatgggagggaacatctagattagaaaagcaacatctagataaaatgcaacatctagataaaattaaaagcaacatctagataaaatgggagggaagcaacatctagataaaaaagcaaatctagataaaattaaaaagcaacatctagataaaatgggaggagggaaggggtggtataacatgtaaacgatgactttgtgtttcatgcgactaccattctagatcaattttaaaaagcactactaccttaagaaaatgctgttgtacttttagaccccaaatgcaaggaatcttttaatctgggacttttattttacacactgtaaagtgtgagttgcttttataagcatttgccttcaaattatttgttcatcacatggttcactctcttaatacaaccttccagtgagaatccatggtgaatgcgaggggcaagcagccaaccatacatcaggttgccaccaacatgcaccaagtatataactctccctccaatactaatccacacaaacaccaaattcttaaggcatataaccctatattccatcagtaggcatttagtggtctgggtaaaagctaaagcaagttgagaataataaaaacaaacacttccaaatacaacaaagagaaaagccctcacgtgcatacaccttaaacaagctaaggcatgttctcaccttcatgtttattagcaaaaaagaactcaagaaacaattgtttaaatcatttaaaccttgcatgtatatatccatggcaaacagcaacaaaggcatttacaatttttattagtgggtgatatttcctgtcaacagaagtggttttgtattacagtgacataagtcaatgtacagactccaaagtttttcacaaaaacactttctattttttgatccaagatagcacttctatgcaatagctcaaaattgccaccaagtggacggacaaacactattctggttgtagttgtagagtaaacagctgcttctgatttgaagagtgttgaactaatcacatcaaccagtgtttactaaatattaatacctactaagcacagggtgctcctctatgcaccacagatgaaaggcattctgatcagagtgagaaggctaaagccctgtcacgggcaccgcatcttgcgtgctaatgttctctggacttcaataggtaaattattccatttatctctttagaggaggaaaaataacctattaaggctactgtgagtgagcaaaacagcaacatccagtctgggaagggcattcatatcgctaataattgttgaatgatatgaataagctccagaaggtataaaattggagtcactcctaaaatcactgatagtgttcaagagactaataaattagaggttatgtggaccccaccttacaatctttcatggagacactgctctagacatagcagtggtgatgtataactcacggtaggtctataaccaaggctagataagcatatggatgagcaacatctacattcccagctagtaagcggcctcttccccatgggtacaccctgacctttcacatggaagagtttagtgtatgtgaaaccccaaaggataggaatctacatacatatttgatgagccaatttatttaataaaatatctaatttttccaaatgagtgactctaagtcctatttaggcaaatcctcagcttctggcattatttattttatgttataaaacataccttctctcttggaagcatgggtaccaaagggaagaacagtaacttttaatggatgcagttagatcttgaaatttttatctgaaaaccataaagcttttaaaaataaatttgcaaatgtaattgagcctctaatagctgctactgatagtaattaaagaaatctcatttccctaaattaaacataatgaaatgtttttcaagatcaaataaaactagaaaatgctatcagcctgatagaatttgcctctgaaagtggtgttctggagtttacagagaagcctcagttgccagcaaaagtcaatggtttatagggttacgggcaatatggaagccatttccactgtatcatatcaacttttattggctgataactgatctgaaagccagtatatggtacagcttcacattgcagtgcttatgcaaatgaagcagacactctaaaattcttcctttagtgcctttaaagagtttgttatttaattaaacgttgtcagcatatcttcagttcaacttacacatttcacactcttaatgttcaatttttacattacttttgcttttcttaaagtgaaatggcatttgggcatcagagtgaccatcttacccaggtctctcttaagcagggaagtgcttcaatttgctgtcttagtatgggctactataacaaaaatcctacagactgggtgacttaaagaacagaactttatttctcacagttttggagtctgggaattccaagatcaacttgccagtccattcagttcctggtgagggctctcttcctggtttacagatggacacctgcccactgtatttccatgtggtagagaaagggcaagcaagctctctgaagtctcttctgataaagtcatgttaatcctatcataagagctccaccctcatgacctaactgcctcttaaagacccaatatccaaataccatcacattggaaatgagagtttcaacattcgaattttgggaggacacaaacattcagtccataacaattgctcagaattgatcattgtcttctcatttcttgatggtctccagacaaaaatacctagtttccctgttatttcagcaatgtatcatcgtggtaatcaaaaaggttttccttatgtttgataaaaatattttgtgtcttaattccttgccttattatttgggcttctatgaatctaagaaactgttcatctctaaactcttcataacaaggctttattccaggaaaatataattaagccaaccattagccttctgttaacagacaccttacctgtcacatacatagaagcttctaacatctcacttgagtatgataagaagtatgatgtatttatgtcatttgtcatccattttttatcacttttgccacatttctctatatttttacattctctttaaaactggtatatccaaaaccagatgtaaagctacataatgggtttagttaatgttatgctcaggcaaagcatggactgatcttactggtgctctatgttggctccatacttccctaaacgaagtaccactcccatccccaccccacccccaccacacaaacagctcttctctactgagagcctctcatttgctcgtcaaattgcgcataacatgcaggcaacaaatacctatcttggaccaattaatgactcttatctaactcttaactacaacgatgccccaaatttttcttctacatatgttccttgattatctccctgctgaaatggtgatttgttttcttaatcctaatacatcacactgctctcactaattattcattcattaactatttagtaattacttcttgccagacactcaataggtattgccattcaattcagaataagacaagtttcctgtcctgaagatacttaaaatctagtccatgccccctacttaagggggactattgttgtaaatcattctattttgtgtctctgttgttcaaagtataaattaactgttctatgttaacattctttcaaaccaatgactgagcatttgctgtctccactccattcttgccccaccctcacctccagatggatgtcagtctttagcacaatcctccaatcaattgtttattcactgatagccttgacaggaaaggtgattacaaactgctagcttaataacagaaacaacaggatttcttcaagtacttaagggggcaagtgtattcaatactgcagtatccccttacctatgatttcagttactcaagtcaactgtgatccaaatataaaatggacaattccagaaataaacaattcataatttttaaattgtacatctttctgaacagcatgatgaaatcatgcacattctagctctgtcctacccaggatgtgaacctagtgtatccatactatagcggatacctgcctgtcagtcactaagttgttgtctgggttatcagataaaacaagcaaagtgtatctagggtccagtccagtccacaatttctggcatccactgggggtctgaatggagcatatatactgaagataagggggaactaatataaagtgttctttacctccaggatttctaactgagttggggctgagtctcacatcttacagtttgtccacctttctttgcctcttttcaaaggagcactttctgtcggtgagggcttcatctacatttttacctcctagttcatgttttcctagagcatcattatttagggggaaaagtaagctgtaacatttttaaataaattggtttgctgatgggagtttaaattggtgcaactgctttggaaaaccatctgggagtatctgattaaagctgaatatatacatcacctgtaacacagcagttccagtttaggtgcatatgtttaccatatatgtacatctgctcacctaaagtcatatactagcagcattattcataagagccccaaaatggaaacaacccaaaggtccattaacacagataaattatgggatactcaaacactgtaatagcatacagcaatgaacaaactacaactacatgcaacaatatagatgaatctcacaatgttgagtgagaagagtaaatactgcatgatctcactttatattaaagagaaacaggcaaaggtaatccatgtcattaggcgtctactgaaggggatttggtttggtgcctagagaggaacttctaggatactggtaatattctatttgttggtttaggtgctgactcacaggtgaacttgtgaaaattcagtgagttaaccaatatgtacgcttttctgtatgtacattatacctcaataaaaagtttttttaaaaaaacagaagaaaatctaggtgaccttgagtgttgtgatgactttttagatacaacaccaaaagcatgacctgtgaaagaaataattgataagttggacttcattaaaatgaaaaaccttaaacttctgctctgtgaaaaatactgttaagagaatgaaaagacaagccacagactggaaaaaatctttgcataagatacatttgataagagatgggtatacaaaatatacaacgaatgcttacagctcaacaataaaaaaaaccgcgttaagaagtgagcaaaagatttgaaagaacacctcaccaaaggtacgcagagggcaagtaaaaatatgaaaagagtctagggaactggaaattaaaacaatgagataccatgacacactattacaatggccaaaatccaaaacactgacaacaccaaatgctgatgaggacctggagcaacaggaactctcattcactgctagtgaaagtataaaatggtacagctagattagaaaacaatctggaagtttcttacaaagctaaacataggcttacctatgatccagcaataataattctagttatttaccaaaatatattctaaacttacatccacacaaaaaaaatgcacatggctgggagcagtggtgtgcccctgtaattgtagctactcaggaggttgaggtggggggacctcacttgaggacaggagtttgagaccagcctgggtaacagtaagataagatcccacctcaataaaaaacaaaaaccaacaacctgcacatgaatgttcatagcagccatgttcataattgcagaaacttgaaaggaatcaagatgttcttcattagatatgaaggaaaccagaatatttctccccaaaatatgaaggattattgagatgaagacaagtaaaatgcagggtagctctctgccttccctctgtttacttaaagcagaataaagaattacaaagacttttaaaaggtcttttgatctctccctatatcccacctaaagaaaaaatgtaaatttccccttactgcagacaatctcgacaaagttagggatggcgccagaggaatgtgagctttactttactttgccacagttttcccccctttggaagcctggaactaatttcctttgccctgtaatttttctaaaatctattgctctttgttgaagattttatgtaagattaaactctaaaccactgccttaagttactttactcctgtgagatgtacgccgaatgcattaataaacttgagtgtttttctcttgttaatctgtctttggttgcagaagtctcccaactgcaaatttatgaatactgaagaaaaattataatttctcccattcagatgaatgaataaacaggcgtgatacatcctgcaatgaaatattattcagtgatataaaggaatgagctatcaagccatgacaagacatgaaggaaccttgagtatactgctaagtgaaaagagccagtctgaaaaggctatatactgtatgattccaagtatagtcatgtgccatataacaaagttttggtcaatgactgaccccatatacaacagtgatcccatgagattatagtactgtaatttttactgtacctttttgtgtttagatatcaaatacttaccactgtgttaccattgcctatgatattcagtacagtaatatgctatacaggtttgtagcccaggagcatgaggccataccatatagcctaggtgtatagtggagtaggctgtagcactaggtctgtgtaagtacactctgtgatgttcaaacaatgacaaaattgcctaatgacagatttcttagaatgtatccctgtcattaagcaatgcatcgttgtacacaaagttttggcaaagttaaaaccatagagacactaaaaagatcagtgatttccaatggttcagagctaggggtcatggatgaatagatggcatgtgaaatatttttagggcagaaactattctgtatgctactataatgctgtatatatgacatttttatacatttgtcaaaacccagagaactatataacaccaagagggaccctaatataaatgatagagtttagtcaataatagtgtagcaatattgcttcatccattgtaacaaatgtaccatattaatgcaagatgttaatcatggtcatgggaaactgtgttgggggtgagagtggagcaggtaatataatatgagaactccctatactttctgcttaatttttctgtaaacttaaaacttctctaaaaaataaagactactgattttttttaaaaaataaactcatttaatagttacaaaataccaaacttgattcactcaaatctattcaggttaatccagggatcacaaagcccttaattttccccttctaccttcagaataaagttcccaaacccccaggcatacaacataaagccctcacccatcaatccagccccatctttaaacactctctcctgtgtccactgtgcttctggcatatctccatgctttcctactgttcttttccttggtcctagaatgccttcccctcccaacacacccctaatcgccttagtttagctggtgagttcctatgcatcttccgaggcccacttcaaatagttcctccttcttttttttttttttttttttgagatggagttttgctctttggtccaggctggagcgtaacggcgcaatctcagctcactgcaacctcctccccccaagaagggttcaagtgattctcctgcctcagcctcctgagtagctgggattataggcgcccgaccaccacacctggctaacttttgtatttttagtagagacggggttttgccattttggccaagctggtctcgaactcctggcctcaggttatccaccctccccggcctcccaaagtgctaggattacaggcgtgagccaccactcccggccagttcctccttcttgaaactctttactgttcttgattaaatgagcatctctttcttctgtttcctaatcacatgctgtgattatgcaactggctcttgatgaaatgggcatcgctttcttctgttttctaatcacatgctgtgattatgtaactgtttgtgtttctgcctcatttgtgagaatgtgaacaactctcacaaatgagggaccatgtcttaaagccacctctggtgaacactggtgccgagtgcataatcaacaagactttattaatcaataaatgacatagttattattcaagttgttattagcactggtacagcaacccatgtgagctgaaggtataacataaatgttaactcagtaaagtcacttctgcaaggggctgagataatatggcttaggtatttgacatgctgcttctataacttaccatggcaataacacttaaagtcacagaggaatcacttgctcattagacacactctctggaagaccagatgtctcaaggaagactttgataagtgctggactgcaattgattcatggctgaattctctgaggagcgtcacaatggtagataagctatatgttggggatgaaatagggatgcatatgctttatatgccagacatgcatacatcagagggagtggtctatttgagaaattaaggactctaacttacagtttttatctggcaaaaagccagttcagttcagcagtgagagttcaaaatataatgcgatcttagaagaaaaatcacagatgcaacccaccacttaaacctgtaatattacacacttaggctctatacctgggccacttttctttcctcttaaattctgctttggcaatttcatctactctaaggtttgaaccattatgcctatgtgaggtacctcctggtatatatctcccctaatgcaggagcagaacaccttccacttgcttttcctgacccttctctactctctcccactctgattcctgccctgggaggctaatgtttgtgccctcatcaataatctgttttctgcctctggcttcctgtgaagtccaaccttggaggagctcaaacaggagatcagaggaaggaccagggagggaggagttttattcacctgactcaatgattcctaaactttagagtacatcaaaatcacacagatgaaggcctgttaacagagattgctgggccccactcctggcatttctgattcagtactgctgggatggggctgagaatctgcacctctaactagttcctgggtgatgcggatgctggtggccaggactccactttgagaacccctgccacagctctttccctggaaggttactgagctacttctaccaaaagtctgtgctcttctcaaggtgacccactctacaagactgtggtgattaatgttatgtgtcaaattggctaggccaccagtacccagatatttggccaaacattattctagatgtttctatgcaggtattttttagacgacattaacatttaaaccagtagacttgtagactttgagtaaagcagatcaccctctgttatgtgggtgggcctcaaccaatcaactgaatgtcttcatagaaaaagactgaccttctaggaagagggaattctgccacagactatctttaaaatcaaactgaaactcttccctggttctctggcctacagaactaccctgcagattttggacttaccaagcctctgcaatcatgtgagccaaaataagtctttctctttttctacgtgtgtgcacacacatccagttgtctctgtttctgtggtgaactctgactaatataaagaattcatccctccaggttcaagtaactgctccctactccctatacagctcttaagacagggcaatgacagtttgactgctacaaagtccccagtttctgtactgtctctcacctgtttctacacctttgcaaacagtccttgtagagtaaacccttgttgaattatcctatttcagatgtgccatctatttcccattggactactctttggtacaatgcaccttaaattagagggaaaactcaccttctctgctttctttctaagcctactgcacctgctgtgttccctcttgtgattaatagcatcacttcctcccaggaacccagacgcataagctcagcgtcagtttttcacctcttgtaattgctggtccagctttccgggttttctatgattctggaagctctttagcagaaagtttatctacttcatttctgtatctccagaccctaacacagcatgttccaggcatctccaggtagcccaaaaatatgtgctgagaaaacaaataaattaaaatgtgtatgaaatcttaaaaattgtatatgcctttcatatacaatgtttccagactccaaattccagtttctttccctaacgctttgctccacacaagcaaagattcactgctaacatactgagtattggttcatcttccacgacaatgcttgtatctattccttcccgtttccacaactctgcttcctgtttctattatttgtgaccgggataattgggtattagcattctaacctgcttccttgcctcctaacctgcttccttgcctccaatctccctgttctctaatccatcttatatcttaaatctctgatcatgactttgtctctatttaacagcttcttattacccaatgaacatgagccagattttttagggtttgcatgcaagatccttcataagctggtcccaagctagcacgccaacctaatcttaccattccctcatatgaactctccactccaggtgctgttcacctgtaccttgcaatctgaatatttccaactctgtatcatactgtgtatgtcccttgcttaaaacagcatgctactcatttttgttcacatctctcagaacctagctcctgccctgttcccaacacaatgccaacccacaataattccattttgcctcaaatactgtcaatagctattttctatatctcacatctggaatctaccaattttattgcttttgaatgtaagtatatcttatctttcaaatcaggctgtaggtaacaagcgggcccatcaaatggtggtctactttcttctatcctccaaacctcaagcacagtcattggaacagtgcaataataagcatttgctacattcttcttcagtgagtatctccaccacctatgaaaaggcatgtctgtgaagaactagtacttactgtgttcctaccagagggcattaatacgtagaggaaaggtttcccatctgcctggggttgacagatttcaaaggggcaggaggctctatatttagctaatcttattgagtgtttgttaggaaaagagcaatgcattctgtgttttgattaatggttttcacgcttttgtttgtggagattttctttgtttctaaggagtattttttctttcacaataaactcccgagaataaaactcagaagatttagacatgcccaggaatttctctatttaatcagcactttaggtgcctcaaatgttagtggctttgcatttggcactcactttgagaaacgctgggatagtgtataaaaagaaactgcatagaagagaaagacttcatgttaattatggagtggtggtaaacaacattattaaatgtgatctactaatgggaatgcttgctcaaattaatgttttcattaaaaaatccatgtaatctaataaattaaggtatttttccaactgagaaagtgattctccacttgccttacaatcaccccatataactggcaggtccactagttaattctctacctcatgaaacactgagagtagtagtaatatggttgccacatgatacaatgcatgttgtatcataaaaatatatttcaactaaagggtagatgtgcttctaaatgaaagaggatatgggtagccagagagagcagtattgctccaaacaaaaatcggacacttgtcctttaggaaatttaaaatatgctgtccttcctttctgtttgctcttggttagggaggttttcactggaatctatttgaggcaagtgctgagtatatttgctgtcattgtgttctttgatctcagtatattgattggatgcagctgcagaaacaggtaatgtgggcaaatatgaagaaaacaaactgctgcctgcagataattttttctggagtgttaggggaaatccaagataattacacattttcttccatttatttttaagaatatgaatagcaatacacacttcagtcttcagaatggaggctgcaccttttaaactcactttgaattatgatttaaaatccattgtgctgcattcattcacttgcttgttcaaaaatatcactgagattttgtgttggacacataaataaggggctacctactctaagactagcatccaggtgtcctattcacacctcagaatgatgcttctctattctctatttccacaacaatcccagagttacataacccattacctcatttatatgttatctccactacttgccagtctagacacctctagtattttgtggtttcaatctatcttatattcaattaacaaaacaatctttccaaatataatttagattagccactggttcaataacacaatatcatgcctcattgattacccatcattcaattaatcactcaacaactaaagttacagagaacctactgctcttctgggcactggtgctagggtcaaaagggagagggaataaagaagaaatacaatgcatggcttgtgctcttaagggctacagtagatagaacaacagcctaccaaagttgtccacaccctaatccctagaaaatgtgaatttggcaagagtggttttgcagatgtcattaaggttacagactttaaaataggaagattgttttggattataagggtgaggccagtctaatctgggagcccttaaaagcagacaatttctccggctggaaacagagagatgcagcaaaagaagaagtcagattccaagcatgagagggactcagtgcgcccagtgctggctctgagatataggcccacatcaaggactgaagagaggcctttaggagctgaggttggtccccggttaaaacaaaatgaggtcctcggttctgcaacttcagggaaccagattctgccaacaacctgagtgaatctgaaagcaaattcttcccagagccttgcaataagagtccagcagaccaaaacttgatttcagccttgggagacctggaacagagaaacccgtcaaggtatcccagactgttgacctacagaatggtgagatgccatgtatctgttgttttcagctgctaaatgtagactgtttgctatggcagcaataggaaactaatacaaagaccctatgaacgatctatagggagggcagtcccactccataaagcaacacattccatcattaagtacaatatgcagggttggtgagaaccactggcatgttcctgtaagttttgaaaggattcagaggagagaaaagtcaatgaggctcatggtagttagagaaggctttatacagtaaatagtatttaaattgattgaataaagatgttagatttttttaagcaagcatttcaaaaaagtagaacatgacagtgacaggcacaagcaagttggaatgactgtgaaagaaaagcttgactggaatggcaaatatagtccaatagtacacataatgagcctcctaaattaaacagtggcttgaaaaatgttctcaggggtcactctaggcaaaagtatgatggggagcaaaaggaagggaactgtttgtacacatgatggggatatgtagtccctctctccatcttctccccatctggtcttcaatcagagtacctccactctgatagcttttacatagcaatttgaacaaagattcagcagctgtattagttttctaaggctgctgtaacaaagtaacacaaactgggtgacatagaacaatagaaatgtattatctcacagtcctggaggccagaagtctgagtctgaaactaaggtatcagcagaccaccttcagggctccctgaaggcagtagggaaggatctgctccaggcctccctcctagcttccagtgggttcctgagcttagcagcatgactccaatcttcacaggacattctccttgtacatttatagggttcactctattccagtctccaagatgacttcatcttaataaattacatctccaaagactctatttcccaataaggtcacattcttttttttttttttcttttcctttctttttcttttttttttttttagcagcgtttatttgatcaaagaacaattcatgaatcaggcagcccttaggatcagaaaagattcagagaactcccaggtcatattctgaggtactggggaccaaataaattttgggatttacaatccaacccataacaatggctgaaataaggtttgaaagctaaatatataaaatagcaactctgaccagcatcgaaagctcttcagccagtaatttaccctccaatgtggacagactggcccttttaggtgcacaatttactcacccttcctgctacttactacccttttcttctcctagaactttccatacccagttctgaggattagtcccagagttttctcctttagaagaaatctagatgataatctatttctagggagagtcttctactttacaggttatattagtagtaaactgtcttatgcttactaaactacttagtaatcactgaactgatatcctctgtgacaggtgtccccagcccccaagctgtggaccggtagcagtctgtggcctgttaggaatggggccacacagcaggagatgtgcagccagccaagagcaagcattgccacctgagctctgcctcctgtcaggtcagcggccgcattagattatcataggagtgcaaatcctattgtgaactgcacatctgagaaatctaggttgcaccctccttatgagaatctaattcctgatgatctgaggtgaaacagtttcatcctgaaaccatctctccaacttccacccccagcccatggaaaaattgtcttccacgaaactggtccccggtgccaaaaagtttggagaccgttcctctatgagactggagccaagatgtatgactcatcttaatcatgctgcacccaaaatcagtgttctacagccagcacaaaccctatatatgtttattgaaaattagtccatctaaaaatatattcagatgttacacacctaaaaacaacgcattcaaggctaaatttagactttgtcccatagaaatacacctctagcccagattttaatttaagcacttcagtgtgtcaatcactttggcaaatacagccgggtacccacatagctctgtactgttgatgctaagtcagccttccagccaaaaccagagaggcaccacctagcattgtgatgtcagtattatgtgtcagcaagatacttagccctgcaacccttaggtggtcatgctttctcccagcccatgaatttctcatgtgaaattttcaagatgtaacaatttttaaaattaagctttagaaactctcaactgagattcacgtttcaaagtaatggcatcctgaaagctcaggcctgtccaaggaaggtttattttattcttttatgccagaaagacatgaggtatatagggcccagaactgtccacaaagacatcttctcctatataggatcttcttccatataggatctcctgtatcagggatctacaaccagggagaaaagtacagagtttttaaactttttctagaaatcccttgaaaccttaagtttagagtcaaggggcttcacctaattcttcctatctccaaggaactatttaaagcagatttgcacttactcattcttggccttttctgtgccctcttgtatagttcatatatagaacctataattaggcactcactactttcaaaagcatgtgtttttcacaccataccaccagcctttggaaaaaggatgttctacataaataggcaaaaggccaagaacaaatattttttaagttttagataattttttatcacatccaagggtggcatttgcaaagactttttttaaaagaagtcatttaattactgcatttaaaattcacataaagcactgtgctagagattaacgatctatgtggaaaaacattttgaatttaaaaagtactgtaccaacatttacaagagttgtagcatcttaagttgaaaagggattgatctatggaaagtagaagtataaatacatacttaaagctgcagaaacatatttgtttttgaaaaaagaagttgaacatttattcatccctgtaaatatagagtgttactatgagagaaaaaaaatcagcataatctacagaagccctaaattctttcatgaacacccttgagaccgtcacctattacttggatcaatcttcacattctataatccatttttactcttaaggaaaaatttaattgacttcttgatgcaacattgtttttttttgtttctttttttttaatttaggaaatgttcaagtctttacatctccacaatacatagtcttataagaagacaattcaggaaactgagagctttcaaagccacttgtggctactcttaaattactttctgcagttaaaataactgtgtgtttgtaaacaaagtgcttttcaagagtaagatccccaaacagtcatacgttatttttttccatgtgagaaaatgcattattgtgaaggttcagagacataaagatggcactagagaactaggatgatgctttcacctccataaaaggagaagtataaaagagaactgcccaaggaaactccaatattcagttgcatgtcagcaaatgggggaaacgttctaaaatgccctacctttatacatttaaaaagatgaaagattaagtttcaaggaactcacagcaaaaaaagagaaaacaccccaaacagtactttgactacctccagaggaattaaagggctatcattccacatgaaaatatcccagcatttctgttgttgtgtctctgcctatgtgattggtcccgaaggccccatacacactggtgttctcagatcacagctgcttcttgtgctttaacttgattgcctctacacgtacagacacagggcatgaagcccatttatcgcaggctcaaatctctgttgatgtcattggaatctaagccttcttgctcctgagctgcaacaggcaagtatagaggcccatagaagacgggagatgaatatttaacttgtccagagttcccagacacctcagaaaatattattacatctacttagtactgactgttgttatcagcaccaagtcaggacagctttatatttttgctggagtaaaatttcagaataaaaaccttttggtattggaactcaaaaatgcgtaacttctgcctgaggaatttcataattcagagatgctgagatggtatctacctatgcgttcttgtaaaggtgcagtgaggaacagagcttagttttgttgttgtttaaactttttccatgttcccgttgacttctattctcatttaaaaggaatttttattttcacttctcaaatatcctcacacttgaacttcaacttttagtttctaggtcaagtagtaattgtatgagatgaattccaattcaaagattcctgttatttggagccagtcccgtaactaggtaagaaccttttcttgtacatctacactaaataatttgtctgttttgcaaatgtggattctcaaaacatagatatcttaaatatgggcatatctcaactgaacaaagcaagcatcaattgaacgcctactttaagcacagcaaggcctcagaaaacagacaatataaaggaagtgagacgcagcaaacagtgagagaataattccaagcccacaggcgagaagtcaattttcaaacagttcactgtgtacaggtccatgctatgcaagcacaggatattttttcataatatataaattgatgccttcaacaatctgtggtggtccatccacacacacaaaaagaaaaaaaccaactatggtgccaagtagtataaaaagttatttatccaaactgctgcttttgttttgatattcaaatatagattgtagtcacaggaagaggaaagatgatagaaggtaaaaacgagctctggagtgagagctgtgtttgaatcctggttttgactctttctagctgtgggtcttggcaacgttgttcactcctgggtacctcatttgcttccctttgtttttgctgaagagtccataaaatgaattgcagagcactaaacaaatcttatttattattatgtagtcttgttgttacaccttacaacacaattgtataaaccatagctttttatgaggttttaaagattgtttgatgagaacctgctctgcatcttgtctttcaccatttctactccaaatcaagtccaagttcttgccactttccttgtggctttgggattccagtctgtttaaatggccacacaccaacctggctatccaggttcttaaacccctatccttcagtgtctcgggaatctctgctttccatggatctttccagatgaaaacttaggagacccctgaagattggaaatgaaataatgtgttttagaagagaatcttgggaaaatatttaacatgaagcaataagctgtatttggatgcctgaagagatccctcatccaaggcacaggacgtctgtatcaacatgcctggctttgtgctgttaacaggtatgaagacagactaggtaacacaaagtgttggcaaagaaagagcagtggttctcaaatgaggatgattttgcctcccctcttctaggtgacatttggccatgtcttgaaactttcgggtgtcacagctggggatgggaggaggtgactgccatctgcaaggtgaaggccagagtgccaatgaacatccatcaatgcacagacagagcctactaccccaacacagaattatctggcccaaaatgtcaatagtgtcaagggagataaaccctgacaaaagcaaaagtaactctcaaacactgctggtgggactgcacactgtacaatccctttggaaagcaatttggcattatgtgatacagctcaggttcaagatgctcacagcctgcaacccagcttttctcctcctgggtaccttcaagaaactcctatgtaagagttttaagaaaatcttttaaaagtcatattcagtattgtttatagaagcaatccaaatttctattaggggaatggctaaattgtggtacatccatgcaatgtgaaaccatctagtagtgaaaatgaatgagctacagttgcgtgtgtcaagagaggaaagcacagaagcagactgactttctcagatgaaaggaactgcagaaaatcaaaagctggggtgatagaacaagcagggtgtccagtgctgacaacagagacagtgatgggtgtaagctttgggctgtgacacacagatgcttctcctgtgttatgagcatgcaagggtcttgcctttaagatcacctgccatctttggtatcagatacccaggtcatttgctggctactatttggccccttagatcccctggtagaaatcctaagccttttgttctcataaaaggaagatatttcactataatcaactaagttgatttcatcatcaacttctcagatcagtttatacaaagattatattattttttggtgaattccattagcattccactagtcaaccaatgtttgagtgcctgctctacgctgtgttccatgtttggtgctttaccaacagtggggatgaaaagtatgtggtctttgttttcagggaccgccagaaaaactaaagaacatcctctggcagtatcaaatagggccctgcagtggaaggaatggggtgaggtccatcagagaaagtctatcagaataggaaacagctatagagaacagaaggatgaaaaggagtcactcatgcaaagaactgggagagaaacattccacagagaaggaaccctgaaatttgagaagataaaacaataatcagtaaaaccattactttaatgtagcatacttcatgtgagtcattttgcctggttcatactttatagagatgcaatcataatttacatacaattttatatcttgctcattattatatcatgaataactttttcacgttgtaatatagtcttcacaaacatttaaatggatgcattatattccctagagtggttaaaacatcttttatttaattagtgttttggggcttagtcattcttattacttgttctttgtccctctagtgtaaagatgaaggtctctctttatgtaacttttccctatgtcttttgcattattgccttaggccagcttttcctaccttaaatttaaacacatatacacacaaatgatgaagtatgtttcattcctgtttcatcttaatcacttttatctttaaaatccttaagcttagagaatagttcacattacccaagccatacaatgtctttcatttcggcacagtcttggactgtctttaaaattcatcacatacataaactgaaaaactgaactacagctaccaaaaaaggttttaaaattgaaatctggttttagggggctgacatttcttgagcttgtgatttaaagtacattttttctttttgtagtctctggcagtcaaccttacagatctcccgtctgagctggtttatgatcagcaggctacattctagatgacaggattacctactaatgtcttagaattaagtaccactaacttgaatcataagcaaattaaacatttcagctcaaatgctttcctgtgactccagcaactttcaggtcttaagattaacaggttgtggtctgtaataaaaaaataaaataaaatcccctacaacttcagcttccctcaagaatccacttacctaagagcaaaagaggtatcctgtgatgggactgaagccctttggtgaaaataaaaagtttaagtgacaacacttagtgtcagcatgacaggttataacccagagaaatctaacccacttggcttactcatcttagtatcactcagggtggaaggcagcataatgatttagctattatttaataactaagataaatcattgaagtaaataatatccttgccatcattaagaataatcccagtgtaagtcatttctaaactacttcacggtgtatgatgcaacaataataaaagcttacgttcacaaagttctttagttcacaaatcatattaatattaacatatttgatccccctaccatacatggtagataggaaagaaagcttctttatcttgtggatattttagagcatcattttcaaggttaagagacctgcttgaagtagtatataatgaagtgaggcaacgaaccctggtctcctgattccaaatcaactgttctttcaactgcaccatgataccctggatcaaagcgtagaacacggattagcttctagttccagctttgacatgaactagccatgtcaccttatacaagtcaagtaactaagcctcagtttattagtaaaatgtcatttgatcacatgatctctgaaggttgaaaattccattttctataaaagaattttctttttacttccatgggaagaaagtgtcttcccactacagattcctgctccccacctctccatccaattattcccctgcaagtatatagatatgatcgattcattaagtcagcttcaatgctataacattatcatcataacagtgataaggtaatattaatagctaattttaagtgtgtgtttactgtttgcaaggtactattttaagcgctttatatgataattcttttaatccttacaatggccctagaacaagctgaaattattattcccactctccagattagaaaatgcaggcctgaagaggtcaaggaatgtgttcaaagtcacaatgccagagctgggattccaactcagacagcctggctcttgagcccacgcacttaatcactaccttacgaatccacattccttgacttaacaatttcacatactttctaagagtgaatttcaactgataacattttttttttttttttttttgaccacagatgttgcctgaatctcactttctggaacagtagcatatgaccatatataaagcccccaaccaacactttccctaatggactattccctgctcattcctgacagaggtgtccgcactgtttctggggttcctttcattatacagactctcaaaaccaaacaggttatttggtaaatggaagagatctattacagtgtggagtcattaaaacagtccttcccagtatccagctcccttccgctttgcctgcttgactttctagagagcccacctcctctttcgagtcagtagagagtcactgagttcaatttgctgcaaactaattaattcctaagaactttgacactagaagctaagaccccaaaacagctcctcctcctttcatcctgagagaaaatatttcagatataatacatacattttcaatttccatatttaaaattcgcttcaatccatttttccccatatttataaggtcacatttgttctttatgttaatggcacagatttcagagccaggagactcaaagtacttctcaaataaagagtgtattcctcactgtgtggtaaaagagtttactcagcttcctctttgaaccatagacagcatttccaccttctaaacgctgtatcccaaatggacaggctgcccctcttgctggacagccctgggacccaggggacatgctagtcgttctccatcactgtccttgtaaagttgtacaaaccagtcttgaaccaagtatttcagcataagggggactatacaggaaaaatataccagcatctgtcagtagcagtgaatgtataaaataaacatcataaagtgggaaaaagacttccaaacaactctcagcaatcttgtctaactatcctgaccttaaaatgccaaagtacactgcagtaaatgggagagcaacatatcaagtgctgtcactatttgccgttccattctagaattccaccacctcgatcttgaaacctccaatcagatgtgctacagtaaatctcccttccactaatcaagatggaaatcttttctttcccaatcaggtccaattgcacagacaaagcagtgcatctgtttccctttcaagacagctcacccaggggatggtggagctttaccgacagaacagctagatggtttgtcatatatcttctcctctcgcagagtgtctctgccatcttttatcagtggttatccagagcttccctttttgtgacaatattaacccaggactgctgccataagcattcagactccacttgctgcctgcagggacttctgaggagagtttatcaagactgctgagcctgatgcttttacgttaaagtggctcccactcgcagttattagtgtgtgcggcgagcccacacccgcacacacatgaggccaactccccacaagagtgctacgcagagcagtagcaatccatctgttttcagttagaaaatacaattgcttttgcacagttgaagaactgatctgatatgaaatgaccctggcagttttgaggtgatagcaaatactctgatgtggctgccaaggtaaggcattaaaggggttacgtaagcataaggcatccctgtgccacttaggaatgtccgtaaagcaataaacaaacagaccaatagacacagaagttgcactatattcccaacttacaatacaaagagcctgcaatcatcagaccctgactttcagaacactgaaatgcttaccttggatgatgttttaaaaaataattttattatgggcatattatattttataattctcagtgattcatacaaaagcaatactctttaaaatggccagaaggatgggcattttaaaagagatgatattagaggaaatgtttaatttcattgcctttggggctccttgtaaggatggaaggcaagattgtgcaacggctgggaacgtgggtgagggcagagtgggggcagatagaactcaaaaaccagctctgcatcttcctagctgtgggacctgggcaagttatttaacccctctgaactagtgcaactgggtgttaataaccacagctacttctctgggttgtaaaaagcttgtgcagatgctgtgcagaaatggtgtgtcatgaatatgaggataatggtttgtcatcatcatccatagtatactatggtttctatcattgtgagttcccaaagaattctgcaatgactgtaacgaagtaatctgtcccatgccttgcagaatcatctctacctctgtgcctttctttattccacactgtgtttgtatttttgccatagaaagcaaagatggagaaaaaatagctagcattccctctaaagagaaatgtcattctgccctgtaacaacaggaacatacacagcctattttgttgaggcattgacaagactccattcacagcaatggcgatgggagtgactattccaaagccatggcttcttcttttctacatttcattccatattgtccttgtggatgtcccatttcacttaagctttctttttggccctgagacatttatcagcatagcctacatgcagatctaccctcccaagcatgccccagcaataactcgtctccagtcctctttaaaacacaaccttctcctggtttactcaggtgacaagcttgctaagtctaataaactgatctagtatacatacatagctcctgatagattaatatattaccatactggcgatactgacaatttttgaagagactatctgaagcaaaatgtaataatctaaatgaattactttctcacgctagaattctagacatttaagcaggtcagtagagagataaagggagcattttgaggcagggtgcttttgaaggcatctcaagttataataaaaggcaacaacctgtttttcatactgtgacatgaaacccacaaaaggagacagttgtttttgtggaatgataaagagaagtaggccattacatgcttaattaaagattcaatccttttaatccagcagaaatgtgacccccaactgagtagaaacgtggtcttcagggaataagcatgttttttttgtttgttgttttgttgttttaatagagaaaagcattaggacaaatctctttattacagggctgaatgcatcctcatgccattggcctccggtggtggtctctgaggtggtctctttctcacccaagagagaggtctggttccatcatgcccagagcactatgtcacatgcattcaacttgccaagaaaagaaagaactcaactaggattatggatgctgttttaaatgaatgtggctccctcttctggtggaaagcctgaatcaataataaaatcatctcaaaggagaaaaggtgcttagcttcttcctctcccagctccagaaatatatgtcaacacaataccactaacaagtgaaccagacaacaatagatccgccgtagttctcatattctgcaaccaaggctaagtggtgaagagatccacaactgagatgcagcaacaagagaagagaaaaagaaatggactttagagggctggatctcttaaaaataagcccttcctataaatatatacatggatatagggaatggagaactaatgctgctttggaaaactactgctaacagaattcttctggggaacaagttaataatgataaaatgtctatttgacatcttgatttttagtgaggtcaaatctacaatattaaaagtatcttccatcacatttcagtaagtcctatggagactctggacactttgaaaacacttttgtttactagaaataatgacttgagccccaactatatacctatttatcattaagccaaaaatgtagataaccttacaaatggcgtaaaatatctatacttaaataaattccaaagcaaagcaaacaaaagtatatgttgataatgcactatgctgcttcctaaataaattctaacaggctgagggttatagaggcctgagaaataaacacggagaacaaaacaaataaccctaacactccaaacagaggagcccagttagactcccacattttgtgtcttaacacttcattgattgttaaattatattcactcctgaatgaccccaatgtttctgcatcacaaatcttgccacttgctggaggctacaacccatatcttttctttttgagactgagtttatcatatctgtttttttgagactgagtttcactcttgttgcctaagctggagtgcaaaggcacgatcttagctcactgcaacctccgcctcccaagttcaagcgattctcctgtctcagcctccaagtagctgggattacaggtgcccaccaccacatctggctaatcgttttttttttgttgttgttgtttttgagatggagtcttgctctgttgcccaggctggagtgcagtggcacaatctgggctcactgcaagctccgcctcccgggttcatgccattctcctgcctcagcctcccgaggagctgggactacaggcgcccaccaacacgcccagctaattttttgtatttttagtagagacgggttttcactgtgttagccagggtagtctcgagagatggggtttcatcacattggtcaggctgctcaaacacctgacctcaggtgatctgcctgcctcgacctcccaaagagctgggattacaggcgggagccaccgtgacgggctatcatatctttatggaagggtttcagtgctggaagcaatgcactgtgctgtcaggcagaaggttcaggttcaggagcactgagggctgcatcctcaagccaggggcaaccagtaaagactcaggtgagattatgtttgatctctgaggagtgcctgtctcctcattcccacgaagattaagtaaagtctttagatttggggatggcaggaggttggggtgggatattgccagagacaacttgatagtggtcatattttctgttctttcatataaagaggtagatttcaactctggggggagctggaagaaagaaaatggctatggaaatactgagcatcattcatatagacaaaaagtctctccttgactgaactccactcaggttattttgaacttttatcaatgaagccctgacttgtgaactttcatgttcatctctccattgttgattttggcaagaatcctgctaagtcagtttagacagaattccccagcctccaaatctgatcatcctccaccatcccccaggtgatgatgtctgatcaccctggcctgtcttcagcaagaatcctgtttggctggtttaccagaatccccccttaccacccactggtccccctaaccctggctcctttgctataaattcccacttttccttgtcgtattcagaattgagcctgaattgagttctatacagaggcctcttgctcccattgcaatactcgagtaaaatctgtttttactattttaaccatggtctagctctggcttttctttgacaatatccacatatgacagatttaccaaaaataaaatctgtttttgccatttagtcatggtctagctctggctttctttgacaatatccacatatgacagatttaccaaaaatctggacactgggatagctataaacgacagatatatgagacatttggaaatcaggagaggggataaacagaatggagagaaggtagaaaaatacatacgctttttttcccccagtgattaaaaacacaaacctggtacaataccattaactgaattaaagtgtttatttgaatttcatcaatttttctcctaatattctatctctgttccagcatcctatccagaatcccatgtggcatttatggccatgtctccttagtctcttctaagctgtagcagttgccaagtctttccttgacttttatgaccttgataaaataccctccagtttgggtttttctgatgtttctcattattggaatgaggttatacattttagacaagtatactacaagaaaaatattagtgtaccttatcaagaagttcatggtgccactagatcttaatactagggatgtttatcttgatggcttacttgtagtaggctctaccaggtctctctactgcgaagttactattttctccttgtatttaacatatatcatggaagagataccttgagactaggcaaattctattattcctcatactttcacccactaattttagcatccatcattatggactcaaggaaatttattttattctacaggctaaaatccatcaccgaggttaattgcattattcattttcttgctcaaattgtaccagctttggttattaaaagctccttttaggttgcattctgtgtccttttgagaaatccccatctatttgggaggcatttccctattctcaggcacaacaaaatattccaagtaacatctttttttttttttctcccccctgctccagctttggaatcaaccatttctccaaagagtcccagttcattttactctacaagaatggtgtttagaaaccaagattggtctctagctgtactctctgtaatgaataacctcatgcgtgtttacttctacaccaccgcagatgcatcatgagggtagatccctaaaccgagactgccaagtccaaagatgtaggtaatcttgttagatgtgactaaatttccctacagaagaattgcaccaatttgcattaaggccagcaatgtatgagtgtctgttttcccacagcatcaccaacagaatgtggtgtgatattatttagttttcaccagtctgataagtgagaaatggtatctccatggtttttaaatttacagttctctaactactgaacttttttttcatatgcccaggggtcatctgtatataacttttgtgaatcatatgtgcatgtctccttcccataattgggtttttctattggatccttgaacctaagattttaagggtttaataccatagacatgttaaccctttcttgtgatatatgttgcaaatacacatttttttgccctagtttgtctgttgtcttttgactttatagtattttttcatgcaattttttagagtttttatataaaatccatcagtcttttgttgcatccagatttgagtcataattagaacgtttttctgtactaggattagagaggaatccagctatgttttctttggaattcttctgtcttttcctctagtacttagtttcatgtactgttcttcacagtgatttgaagtaacagatttttttttggtggtgatttcaaagctgtcagggttatccaaaactttctgagaattgctttaatatctgtactcctacttagaccaaggctaactccaatagtatatatttcacttggagtcactagtaagaaggaattatttgattgaagaattataatcctatctcttctgttccatgtctgcctctgtctcttactctctcgccccacagatgggaaactagaattcaaatgataagcctaattgggttaggagccaccatggaataattcccaacagcccattctttatttgagggtacactctcagctccatataccaaccttcattgtgaaggatgaaggccagaaaccacggtaaatccattcataggacttgcttccccattattagcaccatctgagtctgttaaaaatcttaactaggagtttaatttctctacagagggctttaaattaattagggatgtacatgctaacaaagagcctgatgcatccataaatcaatctggggtaggaggactagtcagggaggatcgtctattcagtggagaccgcatatccagcatccctgttgggttcccaacaaaagggtgcaggtgtggaataggccactgtgacaaggaagccccaataattattttgcatcacttaagccacagcaggtaatatggcaaatcaaagtcccaggcgctcaccaagtgaaacccatgttgccatgaaaagccacatcatatcactttaacctctataaatgaattgccataacactgtgatttattttataccaagcctaagaattaaaagggcattgatcaaaatgatctcctttttccccttttgttaagaatagaaagtaacagatggaaccacttttttttttaatgtgctgaacattatttagaacaacctcggaaattgctggtgtcttttattaaatatacttgctttaaggtttacgctcacatacaattatgttctttggatagaatgttacttatattccattagttaaacacagcactcatttgaaatccactttaaaactgcgtaacaacaactcccaatattcaaacacttccatgtgctagtaacctggtttctagtctttgattagcaaacatctgatgaacaaaagcaaccatggatccttttaaaacaattttgtattttatttgccataatatcatctatatctatatgacagtcatgagtgtatgtgaatgaaacaaaactttttaaaaaatctataaacaatgcccagtttcagtgtggttacagtctctcttgcaggaatttctttgtccatctaaactattcagactccaccccacttccccaactttagggttctgaagtccatatgctagaaaagcaaatacatttaattccatatagggaatattctataattaatccctctttaagctaaaaatgtgttattacataagccctcactaataaagttaagaaatcagtgattttaaaatatgaagcccaaaaagtctcatgatgacatctcaaaagttatcactgatttaagctacattatccaggcggcagatatttaagtttagaaatactggagtcaacactctaagaattttagcgacacaggaggttttgttttctatatatatatatatatatatatactcaagaaacttctgtaaaatgcatgttttccatctctccatccgtgatcacagcgttgtaaggcttacaatgactcaggccctacagagttcacagacatggcaagcaaagaaaagaaaacgaaaaaaggaacactctgtacaaaagatgagagatttaatcacattccctatactgaaggccctggaccaaaccatgaagatgaatgtgggggtgtggggaggggatccagtaatgtactgtccaagccattcatgtgcaaccccgcacagcttcactttacccccttaaaccacacagatgttctcagaatgcaaacatggattactgccagccatgttaaataacccttatcccatatcctgacctaagctctcaccccaactgtttggctactttcataccacaggtttgtaaaactgtggtctatatctgaggtctccactcctacaccagatattttctagtcgagacttccatactagggaggctatcatgaggcaccccaacaacacccatgggagtggtatcagggaaggccatgaagggagccaggacttccatcactgccaggtggtaatgagctccccatccccacaatgtaagtggagaccacctgggaagtctggacttccacctctacccagcagtaatgaagcatcagcccacccccaacaattccccgttggggtggtgtgagaggaggcctggtggagaggcaggatttcatcaatgctgagtggcaaggaggctgcctacctctcctgtcaacgtaggccaagtggatgacaatagcaaggcccttcttcccatcccaataggggtgcagggtagctgtggaagcctagtagggagccagaagtcccacacctgcccagcagaagttcccctttggtatcaatggaggctgataaagaacctggactagtttcccaaactggcagtaactaggcagatcctcccttttctcctactggagacgtagcaatagatgccaggcagagccgaaggtttaaataagaaccagggctgggagcagtggctcatgcctgtaatcccagcactttgggaggccgagcaggtggatcccattgaggtcaggagtttgagacgaccctggccaacatggggaaattctgtctctataaaaaacatgaaaattatccaggtgtggttgtggtgggacaatcctgtagtctcagctactcaggaggctgaggctggagaattgcctgaacccgggaagtggaagttgtagtgagccaagatcaggccactgcactccagcctgggtgacacaatgagaccctgtctcaaaaaaaaaaaaaaaaaaaaaaaaaaaaaaaaaaaaaaaggccaggcgcattggctcacgcctgtaatcccagaactttgggaggccgatgcgggcggatcacgaggtcagaagattgagaccatcctggctaacacggtgaaaacctgtctctactaaaaatataaaaaattagccaggcgcggtggcgggcacctgtagtcccagctactcgggaggctgaggcaggagaatggcataaacccaggaggcggagcttgcagtgagccgagatagcgccactgcactccagcctgggcaacagagcaaggcaagactccgtctcaaaaaaaaaaaaaaaaaaaaaaaacccaggtctctcctaatataaaccagcagggcctaagcatggtagctcattcctttaatcccaacactttgagaggctaaggcaggtggatcacttgaggccaggaattcaaaaccagcctgcgtaacatagggagaccttatctctacaaaaaatatttaaaaattatctgagcttggtggtgtcagcatgtagacctagctactcaggaggctgaggtgggaggatgccactgcactctaggctgggtggcaaagccacacagaccctgtctttaaaacaaaaccccaaaaaacaaaagaaagcaaaaagtaacaaaaataacaggttgagtataccttatttaaaaggcttggaaccagaattgtttcagatttggtttttttttttttttggattttgcagtttgtattacacttaccagttgaacatccctaacccagaaattcaaaatgctccaacaagcatttcctttaggtggtatgttggcactcaaaaagttttgaattttggagcattttcaattaaggattttaggaatagggatgtttaacctatactccaaaagtccaggtttcaattaaaaaaaaatcactcataaaacaaaaaaccaagatctctaagtgaatggaaaaagacaatcaatagatgacaacgagaagacagagatgtttgaattatctgatgcagattttaaagcagttgtgattaaaatgcttcaatgaatagtaatgaacatgtttaacaagtaaaaaccagaaatccttagcaaagaaatacaaagtcttagcaaagaaattaaagatataaacaagaactaaaagaaaatttagtactgaaaaattcagtagccaaaatatacaagtcaatgagtgggctcaatcgtagcatggaggtgcagtgaacttcacagacaaaagaaaatacacagtctgaatgaaagagagaaattcaactgaaaaaaaggaataatgaacagtgtctcaggaatgtgtaggaatgaaacagagggtttcagatttacgtcctcagagtttttgaggaagagaaaagagactgaaaaagaattcaaagaaagaatagataaaaaaaaaatcaaatttgacaaaatacatacagatttaagaaacagagtaaaccccaaacaggtaaacccagcgaactctgtgccaagacaaaccatcgtcaagcttctgagaatgaaagacaaaggaagtcttgaaagcagtgagggaggaatgacaccatacctacagggtaaaacacttgcattaggaatcttggagggcagaaggaagtggcacaccatttttcaaatgctgaaaaaaaaagaatgccaatcccagaatcctatacccagtcaaagtatccctcagtaatgaaggagaaatcaagacatctcaaataaaggaaaactcaagaaaatctgttgccagtagacttatcctaaaagaatgattaaagacgtttttttttccttttcttttctttctttctttgaaacagggtctcactgtgttgttcaggctatagtacagtggcatgatctaggctcacggcagcctcgaactccccaggctcaggtgatcctccccactgcagtctccgtagtagctggagactacaggaacacaccaccaagcctgcctaatttttgtatttttttgtagagacgcggtttcactatgttacccaggctggtcttgaactcctgagctcaggccatccatccgccttggcctcccaaagtgctgggattacagacgtgagccactgtgcctggccaaatggttaaagaaagttttctaaataaaaacagaaatgataaagaagtaaccaactcaaaacagattaaagatacaaatataagacctgaaaccataacactcctagaagaaaatataggggaaaagttccttgatattggtttggcaacaatgtttttaatatcaggcaacaaaagcaagcaaatgaggctatatcgaactgaaaagcttctacacagcaaaggaaacaatgaacaaaattaaaaggtggcctatggactgggagaaaatatttgcaaactatgtatctaataagggattaaaatccaaaatatataagaaataaaataaaaataaataaaaacctatgatgcttatttacacatacacactcaagaaggaatcttggaacatcgggggaaagaaagaacatggtaagaaaaaatataaataaatataatgggtttttattctcatgagtttctaaattatatttcacaactgaagcaaaaacaacactatgtgatatggttctaaatgtgtgtcaaggaaatctttaagacatttacattataagcaggacaggtaaaagggacaaagatttctgtactttacttgaactggtaaaatgatgacactgatatacttcttagttatgtatatataatgtaatacttaaaggatccactagaaaagctacataaaccgatacactaaaaaatactctaaatacatcaaaacagaatcctaaaacatgtttacatgcaaggaaaaaaagcacagaaatgaaaaacggagggaaaaatggaaggcaataaataaaatgacagacttgaattgtaatacatcaataattccattgaaagtaaatgatctaaatgtgctaattaaaatcatatttctctgggaggctgagctgggcaggtcgtttgagcccaggggttcagggccagcctcagcaacatggtaaatccccatctctacaaaaaaaaaaaaaaaaaaaaaaaaattagccaggcatggtggttcatgcctgtagtcccagctacttgggaggctgaggtgaaaggattgcttgaccctcggaggcagaggttgcagtgagccgagatcacaccactgcattctaggctgagtgtcaaagtgagactctgtctcaaaataaggataaaaatgaaaaataaagacagatttgtacttgtacagtggatttaaaaacatgacagacacaagtaagtgctatctacaaaaaactcacttaaaataatataatgatatagatagggttaaaagtaaaaggacgaaaaaagatatatcacactaacattactccaaagaaagctagagtgactatattaatatcaggtagacttcagagcaaagaaagtgacaagagaggtacatcataaaattataaaatggtctattcaccaagaagacatagtaatcattaatgtgcaccaatcaagagctggaaaatatgtgaaatggaactgaaagaactgaaaggagtaatagacaaatacacaattatagttgtagacttcaacactcttctcccaacaactgatagaccaactacacagaaaatcagcaggatacacaacaatagcattaaccaacaaataggatctattcaacatttatggaacagtctacccaatgtaattaatacaaaagtacataaaatacactaaagaaattcaatgcacatcttttctgagtgcccagggaacatttgccaagatagaccatatcctgagccataaaaaactcagcaaatattaaaaatttgaaatcatacggactgtgttctccaaccacaatgggattaaacttcgaataaaaaataagagaccagtaaaatatccaaacacttgaaattaaacagcacacttctaaataatttatgtgtcaaacaagtctcaagtgaaataaaaaatacatttgactgaataaaaatgaatatatgacatatcagaatttgtgggatacaactaaagcaatgccatgagggaaatttatagcactagattcatacattggaagagaagtctcaaatcagtaatgtaagttcccaactcaaaaacagaaaaagaacaactaaatccaaagatgtagaagaaaggaatgaataaatataagagcagaaatcaatgaaactggaaacaaaagcaataaataaaataaatgaaagtaagagcagattcttgaaaagttcaatcaagttgacaaatttctagcaagattgcaaaggaaaaaagagaaaagacacaaattaccaatagtaggaagaaaacaggagctatcactacagacacagcagatatcaaaaggatagtaagaaaatactatgaacaacactgcatacataaatttgacaactttgatgaaatgggtcatttccttcaaaaacacaaactaccataactcacccaataagaaacagataatttccatgaccctgttaataatattaagaaaattcaatttataatttaaaaatccacacacaaaagaaatctccaggcacagatggtttcactagagaaatctacaaaatgcttaaagaagaattaacaccaattttatacaatctctttcagaaaatacaacaagagggaatacttcccaattcattttataaaattagtattaccctgatactaaaacgagataaaggcaaataaaaaaactacaaatcaacatccctcataaatgttaatgcaaaactcattaccagcacactaagaaacagaattcagtaatacataaaaagaattatgaccaaatagaattcatcagagggacatgagaatggaaaaaaatatccatcttatcaacagtctaaaaaaatcaacatcaattgatgtgggaaaaagcatttgacaaacttcagcccattcatgatgaaaactttcagaaaaatgggaatggaggggaacttcctcagttaaaagagcactggccaaaaaccaaacaaacaaacacctcacaaactacagataaatggtgaaaaaagactgaaagttttctcacaaataatgagaacaaggttagactgtccactttcactaattttgttcaacataatgctgaaagatctagccattgcaatcaggcaagaaagcaaactgaagtcatacaggttaggaagaaataaactttctattttcagaagacattgtctatataaaaaatcccaaggaatctacaaaacctcctaaaattaataactatatctcacagaatcataggatacaagattagcacccaaaaatctactgtatttctatatattatcagcaagtatgtgcaaaacaaaatttatatttttatttttattttttttctacttttgtgttacattcagagtgtacacgtgcagggtttttacatgggcatattgtgtgatgctgaattttcaggtatgaataatcctgtcacccaagtagtgagcacagtacccaacaggtagtttgttagcccactcacccttcctccctgctctagtagtccccagtgtctattgttctcatctttacatccatctgtactcaaattttaactcccacctataagtgaaaacacaccatatttggttttctgttcctgtgttaattagtttatgataatggcctccagctccatccatgttgcttcaaaaaaacatgattttgttcatttttatggttgtgtagtattctacggtgtatatgtatcatcttttctttatccaatccaccactgatggacacttaggttggttccatgtcttcgttattgtgaatagtgctgtgactaacatatgaatgcatgtgtctttttggtagaacaatttatattcctttgggtgtatacccagtaatcggattgcggggtccaatggcaatctgttttatgttctttgggaaatctgtaaactgctttccacagggactgaactaatatgcattcacactaacagtgtataagtgttcccttttctcaacaacccctccaacatctgttattttttgacttttaaatagtagccattctgactggtgtgagatggtatcttactgtggttttgacttgcatttctctgatgactagtgatattgaacatcttttcatgtttgttggctgcttccatgtattcttttgagaagtgtctattcatgttctttgcccactttttaaggggttggtttgtattttgcttgttaatttgtttaagtttcttatagattctggatattagaccttcgtcagatgcatagtttgcaaatatcttctcccaacatacaggttttctgtttactctgttgaaagtttattttgctatgcagaagctctttagttaagtctcatttgcctattttttattttgttgcttttgcttttggggtcttcatcttaaattcattgcctagaccactatctacaagagtatttgctaggatttcttccagaatttttatagtttgaattcacacatttaagtcttttgtccatcttgtgttaatttctgtataggatgagagctaggggtccaatttcattcttctgcgtatggctagccagctattccagcatcatgtattgaataggattcctttccctattgcttattttttgtcaactttgtcaaagatcagatggttataggtgtgcagctttatttcagtgttttctattctttctcactggtctatgtgtctgcttttgcaccagtaccacggtgttttggttactgtggcactatagtatagtttgaagttgggtaatgtaatacctccagctatgcttcttttgctccagaattctttgactatttacgctcttttttggttccatatacattttagaacagtttttttttctatttctgtgaaaaatgacattagtattttgacagaaacagcactgaacctataaattgctttgggcagtatggccaactgtaataatattgatttttctgatccataagcataaaatatttttccatatatttgtgtgatccctgatttctttcatcagtgttttatagttctcctttagtgatctttcacctccttagctgtattcctcgatacttcattttttatggctattttgtaaatggggttgtattcttgatttggttctcagctagaatattattagtgtaaagaaatgccagcaattttttacactaattttgtaccctgaaactctattgatgtaatttatcagttctgggagccttttggtagaatctttagggctttctaggtatagaaccatatcgtcagtgaagagagatagtttgacttcttcttttcctatctggatgcctttttatttctttctcttgcctgattcctctggctaggacttccagtcctatattgaataggagtggtaagagtaagcatccttgtcttgttccgttcctcaaggagaatgcatccagctcttgcttgttcagtatgatgttggctgtaggtttgtcataaatggctcttattatattgaggtatgttccttcgatgcctagtctgttgagggtttttatcatgaagtgatgttggattttgtttaaggctttttaggtgattaagataatcatatagtttttgctttttgtttttatgtgatgaatcatgcttattgatttgcttatgttgaaccaaccttgcatctcaggaataaagcctacttgatcatagtgaattaactttttgatgtgcagctgaatttggtttgttaatattttgttgaggatttttgcatctatgttcatcagggatatcggcctgcggttttctgttttcactgtgtctctgcaaggttttagtatcaggatgatgctggcttcgaagaatgagttagggagaagcccctgctcctcaattttttggaatagttctagtaagactggtacaagtttttgtacttctggtagaattcggctatgactcaatctggtccagggctcttttgagttggtagattttttaccactgattcaattttggtgcttgttattggtctcttcagattttcacttttttcctggttcaatcttgggaggctgtgtgtttccaggaatttattcatttcctctagattttctaatacgtgtgcagagaggttttcacaatactctctgaggatcttttgtatttctgtgagattaattgtaatgtcatctgtgtcatttctgattacacttatttggacaatataatttttcttctttgttaacctagctagcagtctgtcaatcttgtttattcttttgaagaactagctcttggtttcactctttcttttttacaattttttttgcatcttaatttcattcagttcttctctgattttagttacatcttttcctctgcaagcttcgggtttggtttgttcctctttcctagtttcctactgccatgtcagattgttaatttgagatttttctaacttcttgatgaaggtgtttaatgctataaactttcctcttatcattgctttagctgagtcccaaagattttcataagttgtgtctctattttcattaattttaaataaagttttttgtttctgctttaactttgattttcacccaagagttattcaggagtaggttaatttccaggcttttgtatagttttgagagatcttctttgtactgaccaagaacactgttgtactgtgttctgagagtgagcctgatgcaatatagatttttaaaaatttattgatacttggaaagcacaatgtaaaagacaatgccatttataatcacacaaaaaattaaaatccaggcatgctggcatgcatctgcaatcccagctactttggaagctatagtgggaagatcccttgaacccaggagtttgagacccacatgggcaaattactgcgaccccatatataagtatacaataaatatttagatgtcaagctaacaaaacatatataagattgtatgccaaaactatacaatgataattagataaatcaaagataatctaaataagtgaacagaaagaacatacttatggattggaagacttaaagatgtcaattttcccaaattgatatttaaatttaatgccatttctataaaatttccagtgagatggccttctttgtctcttttgatctttgttggtttaaaatctgttttatcagagactaggattgcaacacctgcttttttttgttttccatttgcttggtagatcttcctccatccctttcttttgagcctatatgcgtttgcacgtgagatgggtctcctgaatacagcacactgatgggtcttgaatctatccaatttgccagtctgtgtcttttaattggagcatttagcccatttacatttaaggttaatattgttatgtgtgaatttgatcctgtcatcatgatgttagctggttattttgctagttagctgatgcagtttcttcctggcatcgatggtctttacaatttggcatgtttttgcagttgctggtactggttgttcctttccatgtttagtgcttccttcaggagctcttgtaaggcagacctggtggtgacaaaatctctcagcatttgcttaatggtaaggggatcaaatcaacaagaagagctaactatcctaaatatatatgcatccaatacaagagcacccagattcataaagcaagtccttagagacctacaaagagactcagactcccacacaataatgatgggagacttttaacagtccactgttaacattagacagatcaacgagacagaaagttaacaaggatatccaggaactgaacccagctctgcaccaagccgacctaatagacacctacagaactctccaccccaaatcaacagaatatacattcctctcaacaccatatcgcacttattccaaaactgaccacatagttggaagtaaaggactcctcaacaaatgtaacagaaaagaaattataacaaactgtctctcagaccacagtgcaatcaaactagaactcaggattaagaaactcactcaaaaccgctcaactacatggaaactgaacaacctgcgcctgaatgactactgggtacgtaatgaaatgaaggcagaaataaaggtgttctttgaaatcaatgagaacaaagacacaacacaccagaatctctggggcacatttaaagcagtgtgtagagggaaatttatagcactaaatgcccacaagagaaagcaggaaatatctaaaattgacaccctaacatcacaattaaaagagctagagaagcaagagcaaacacattcaaaagctagcagacggcaagtaataactaagatcagagaagaactgaaggagatagagacacaaaaaactcttcaaaaaatcaatgaatccaggagctggtttttcgaaaagatcaacaaaattgataggctactagcaagactaataaagaagaaaagagagaagaatcaaatagacacaataaaaaatgataaaggggatatcatcaccgatcccacagaaatacaaactaccatcaagaatactataaccacctctacacaaataaaccagaaaatctagaagaaatggataaattcctggacacatacagcctcccaagactaaaccaggaagaagttgaatctctgaatagaccgataacaggctctgaaattgaggcaataattaatagcctaccaaccaaaaaaagtccaggatcagatggattcacagctgaattctaccagaggtacaaagaggagctggtaccgttccttctgaaactattccaatcaatagaaaaagaaagaatcctccataattcattttatgaggccagcatcatcctgacaccaaagcctggcagagacacaacaaaaaaagagaattttagaccaatatccctgatgaacatcgattcaaaaatcctcaagaaaatactggcaaaccaaatccatcagcacatcaaaaagcttatccaccacgatcaagttggtttcacccctgggatgcaaggctggttcaacagaggcaaatcaataaatgtaatccagcatataaacagaacaaaagacaaaaatcacatgattatctcaatagatgcagaaaaggcctttgacaaaattcaacaatgcttcatgctaaaaactaggtattgatgggacgtacctcaaaataataagagctatttatgacaaacccacagccaatatcatcctgaatgggcaaaaactgcaagtattccctttgaaaactggcacaagacagggatgccctctctcaccactcctattcaacacagtgttggaagttctggccagggcaatcaggcaggagaaagaaataaagggtattcaattaggaaaagaggaagtcaaattgtccctgtttgcagatgacatgattgtatatttagaaaaccccatcatctcaacccaaaatctccttaagctggtaagcaacttcagcaaagtctcaggatacaaattcaatgtgcaaaaatcacaagcattcttatacaccaacaacagacaaacagagagccaaatcatgagtgaactcccattcacaattgcttcaaagagaataaaatgcctaggaatccaacttacaagggacatgaaggacctcttcaaggagaactacaaaccactgttcaatgaaataaaagaggatacaaacaaatggaagaacattccatgttcatggataggaagaatcaatatcctgaaaatggccatactgcccaaggtaaattatgtattcaatgccatccccatcaagctaccaataactttcttcacagaattggaaaaaactaaagttcatatggaaccaaaaaagagcccacattgccaagacaatcctaagccaaaagaacaaagctggaggcatcactctacccaacttcaaactatactacaaggctacagtaaccaaaacagcatggtactggtaccaaaacagagatatagaccaatgggacacaacagagccctcagaaataataccacacatctacaactatctgatctttgacaaacctgacaaaaagaagaaatggggagaggattccctatttaataaatggtgctggaaaaaactggctagccatatggagaaagctgaaactggatcccttccttacaccttatacaaaaattaattcaagacggactaaagactgaaatgttagacctaaacctataaaaaccctagaagaaaacctaggcaataccattcaggacataggcatggacaaggacttcatgactaaaaaaccaaaagcaatggcaacaaaagccaaaattgacaaatgggatctcattaaactaaagagcttctgcacagcaaaagaaactaccatcagagtgaacaggcaacctgcagaatgggagaaaatttttgcattctacccatctgacaaagggctaatatacagaatctacaaagaacttcaacaaatttacaagaaaaaaaatcaaacaaccccatcaaaaagtgagcaaaggagatcaacaacatttctcaaaagaagacatttatgcagccaacagacacatgaaaaaatgctcatcatcactggccatcagaaaaatgcaaatcaaaaccacaaagagaaactatctcacaccagttagaatggtgatcattaaaaagtcaggaaacaacaggtgctggagaggatgtggagaaataggaacacttttacactgttggtgggactgtaaactagttcaaccattgtggaagacagtgtggcgatccctcaaggatctagaactagaaacaccatttgacccagcaatcccattactgggtgtatacccaaaggacaaatcatgctcctataaagacacatgcacacgtatgtttattgcagcactattcacaatagcagacttggaaccaacctaaatgtccatgaatgatagactggattaagaaaatgtggcacatatacaccatggaatactatgcagccataaaaaaggatgagttcatgtcctttgtagggacatggatgaagctggaaaccatcattctgagcaaactattgcaaggacagaaaaccatacaccacatgttctcactcattggtgggaattgaacaatgagaacacttggacacaggatggggaacatcacacaccggggcctgtcatggggttggggggagcagggagggatagcattaggagatatacctaatgtaaatgatgagttcatgggtgcagcacaccaacatggcacatgtatacatatgtaacaaacctgcacgttgtgcacatgtaccctagaacttaaagtataaaaaaaaaattccagtgagatattttttaaatatatgcaggattattctaaaatatatatggaaaggcaaagctaaaactaatgtgaaaaatgaagaataaagtgagatgaatctactaaattccatgacttattatattgctgcagtaatcatgactgtgtgttatcagtggagggacggacatagataaatgggacccaataaagaaaccagaaatacacctgcatgaataagtccaactaatttttgacaaatatgcaaaagtaattccatgtgggaaaaacagtcttcaaaaaatagtggaaaaattggccatctataggcaacaaaaagaacttcaacctaagtcttataccaaatgtatcacaagctttaaattgaaactgtagatcttttagaaaataggagaaaattgttgagaactaaacctacgcaaatagttcttagacttgctaccagtagcacaaatccataaaagggaaaacctgggcatcatcgaaatgaaaacttttgttctgtgaaatatccatgttaagaggatgtaaatcagttatacactgggagaaaacatttacataccacatatactaccaaggactagtttccagaatatataatggactctcaaagctcgaaagaaaaaaaaatacaattcaattagaaaacgggcaaaaagacatgtagagacatttcaaagattatacacaaatgacaaataagcacataaaagatattcaatgccactaaccattagagtaatgcaaactaaaacgacaatgagatatcaatacataactaccagaaaggctaacaaaaaaacagtcataacacaccaaaggctgatgagtgaggatgtgcagaaaccaaatcactcatacattgttggtaggaatgtcaagtggtacagctgctctggaaagttaagcagtttcttaaataactaaccatgcaacttagcacactgcaatccctgggaattgatctcagagaaatgaaaacttatgttcgcacaaaaacctgtacacaaatgtttacagcagttttattcataaataaagccccaaactgaaaacaacccaaatgtctttcaataagtaaatgattaaaaagttgtggtacatccatatcatggaatagtatttggtgattaaaaagagaaacaatgcttcatgcatacaacaacttgaatgattctccaaagaattattctgagagaaaaaagacaattccaaaagattatatactacatgattccatttatgtaacattcttgaaatgagaatatgatagaaatgtgggaatagattaatgggtgccagagttataaagggcatggggagaaggggaaatggttgtggctatgaaagcacaacgtaagggatccatgtggtggtagaaatctttgtgttttgactgtatcaatgtcaactgataccatgattttggtatagtttttcaaagtgttgccatgggaggaaattgggtaaagggtcctctgggctctctctgtatgatttcttacaacttcatgtgaatgtacagtagttatctagcaatgaaaacatctgttaaccagctagagaaattattaacttttgcaagaagacactttcacttttcaagcaccttaaaatttagtgtattctagtgattattataattttatgagatttataaatataaacactagtagtcggtataaaaagcagcagttcaaataaaccggagaaactcaccatcttatatgcctgtactagcgattcaaccaacatgtaattgtattagaagctctgaggagtcttggtgagtagacagctaactttgcttaactactgttaaactttaaactcagtggagccagagtatttgtagtctctgtgtcacttggatgtactttgtcttttgatatagaaagaaaatttctgatttaattccaaagtatattttaaaagactgtttctacaaaataccaacatattttagtcaaaaattaagcatattgataattttctacaaacaaattggatcagcggctgtgttacagttgctaagggcaagctgacagtgactttactgcttttaaatttaatacacagttatgcacaaatatacattgatatgcataagtgcatatgcgtatacatgcatatacatatacacccgcatatatgatgttctcattagtatgcactcgggtaagaaagtgaaaatttttctaaggctcctttttttaaaataaaaactaatgaaagctagagaaaggtggcactagctctctttgaaaagggtttaaaagtggttatcctatacctgaattaatcactcacttaggctggtgtatttcagtttacacatcatgaagcaatagaacacagattagcaactatgatgtaatcctatgatttttacccaatggctgaaaaaaaaaatcttccaccacacaaagctgttgaaatgcatcttattccacacatacggtaggaacaatacttagcatcaggaaccaacaagtcagtttcctggcttcctgacttcttagtttaattacgtgtaggacaagcacatcctcctctgtgatctcacatctggcaagcacagctctcatgccaaggacactgatgttacgatttttatttctactattccaaggtgaacttctctcctgaatttccatgttcctactatctatccccgtgtttcctatttctggtaattatacacctcttcctataatcttttattttctgcagctttggtcttgctcacttttacacctaatactaaaatttaaattttatataactaaatattggtgctaatcatgtgaagtgaattattttaagaagaatgcattcatattcctgcattcacagacccagaaaataaagaggtaattattatgctagataaaagagctcgtggaagtatagacagatactagataacagattgttcataggtatatatgaaaaaaatattctagctccattgagttaaaatttaacagtagttgagcaaagttagctgtctactcaccaagactcctcagaacttctaatgtaattacatgtcggatgaatcactaatacaggcatataagatgctgagtttctccagtttatttgaaccactgcttctcataccatatactgcaggtgctatgagccaaaggttcatctcagaagcagtaaccaacagtaaaaagccgcctcacttacttgtgcacgaactctgcagtgtagctagagctgtgtgccaggacaacatgaatgatcagatgggcacaaaatcaagacactcaggttatgagctcaaaaattaggttcttctaaaaagtgtggctatcgaaatgacaaaagttaaaagtttcagaatatatgattattaggtgacacagatttccaagaattgagtgaaagcacttttccaggatgtccagagaatagacgaaatcagaatcatttgcagcacaggctccttgacaacagaaagctcttcaaaataagtgtaaaatccagcatacatgtgtcatgctttcctcttaattcattctgtcttccactcaagccactatcaatcactaggcaaaaggtatttggatgaaagttctccataaatactgaagaggatattttccttgtctgggccattgaagaatggcaaagataaggatggaaattaactagtgtagaaatcaagataattacacttgaaaagcagccttattatggatctttggaatatcatgaaaatcagaaattctgaaattgaattttaataataatcagaaaaaaaattgtgacaaatatgccaaggcaattcaacccataagagaagcctcttagacaaatggtactgaaataactgcataacatattgacaggaaaaaataaaacttagcttgtgatatagtgtatctcaggaaaacatggttaccaccttaacaaggaaaataagactgatagagtcaagattataaattttaatgcctgttagagaagtaaagccattaagaaacatacatcaattgaaacccaggaatggattccccggccacccagcacccacaaggaaataaagaggagacccatggcttccttctttctgggtaaaacgatggacagaagagaaggctgccattaataggagttagaagaaaccaggtaacgttttacaaaaatataaaggttcactatgctcgtgtgttggtttagaatccctaggcagttcctctacccacctgccaatgttttgccatggaccttcacagaatcttcaactggaaatgatgggtgagagaaagaagaacttctaaagtgtatgagcttcagtgaccattgaaagctaagagcagggaacaggaacccctgaggtatatatctgggcttccaataagtactaggcaggaaatactggtggctggggatgggtcagggagagctaagagagaattaccctcaggagccaaggcatagagcttcctaaagctggggacaaaagtaagagaactgaggcacacaagcgcttgacatcttcactgaatatactgctacagcctctaatgcagagaagagcactaaggtagaaaggctgggagtagaactaccacagtctgtaccacagaacacaaatataaatcctagacatggaacatctatctaaggattctggaaagtaaacagtagcagtggagaaggaaaccagaattagaagttccgctgaaccagcagtgagcctaccatttttcaccgcctggtatcaccgggtctagactcacagcccaaaactcagaagtatacaccagatgtggacagaataagctccagaagcagcattctttctagtccaaggagcaggaaagggagccccaaaggatcagagaagcagggacttacaatgtttagttttttcctagtttcccttctcttgttccctagccccagaaaaatctgcactgatggtggcagcagaaggatggcactcagatggcaaggtcatcacctaaagctctgaaggagggggaccttgttccttcccagaggagcttcaatcagaagagtaagaaacaaattcctaatacctttttccccctctctatcttctgactgttttgttccagacatagatgtaatcatgagaagtgggcagaagagaagaaaaactaatgttccagctttctagataaaagatcaggaaaggaggctccaatgaggctaaaaatgccagagagctccacaaagagagggaatcatcaaaggagcaataccataaagtcgtgcatgaagtactatgcttgcctctgagctacacctatgtggatctgatcataaacaccacaaagaagaccagagacgagatcacactggcctcaggtagtacacacatggaataaatccaaaaagtattgtgaacactatggaaagtcaggtgatattagagccacagcccacagaaggcaggtcagaacttgaggcctgaacctcacctggccaattgccagctaaaacaaaacaaatcaacattatcttttgaattaaagcaagacaaagaataccataatacaatatccaaaatatccagaatactgtccaaaatcactcaacatatgaagaacagggaaaatctcaactcatgagaagaaaagatcaacagataacaaccccaagatgacacagatgttggtttaaaaaaaaaacaaaaacagggctttaaagaacgaaatataaccttcttttcaaaagaagagcaaacagctgggcatgatggctcatgcctgtaatcccagcactttgggaggccaaggtgggcagatcatgaggtcatgagatagagaccatcctggacaacatgatgaaaccccatctctactaaaaatacaaacaattagccatgttttgtggtgcgttcctatagtcccagatactcaggaggctgaggcaggggaatcgcttgaatccaggaggcggagattgcagtgagccaagatcgtgccactgcactccagcctggtgacagagcgagactccatctcagaaaaaaaaagagtaaactcttgaaaaagcggaaagatagaatgtctcagcaaagaaacacaaaatacaaagaaaaatgttaaaactgaaaaattagagaaagcaaagtaaaatatttactggattgagaataccagaatggagatgatcaagaatcaattaatgtgaaaatatatagataggcattatccaatatgttcaaaagagaacaaaaatgaagggcaataataaaagttatagcatttatatcaacagcctcagaaagacaggagaaaaagtgtggtgcaaacatacatgtatctgaagaaataatttggtgaaagacaaatttgctgattcaagaaactcagtgaaccccaaacaggataatttcaaagaaatctatgtccaaacacatcataaccacactgcaggaaaccaaagaaaaaaataagaatatattgaaaattgccagagaaagaaactggggaagaataactctaatgactgtaggtttctctttagaaatcatggaaactagaaggaagtagaacatttttgaagttctgaaaggaagaaactaccaacaagcttttagaaaataaaacttgtaacaagttttgtttcattgtcatcaaaaagtaaaaaataattaggattcaggagctctatgccaacaactatcaaatattgctgagagatattaagaaagacctaaatgaacagagatttacatcatatttgtggattaaaagattcaatattttaagatgtcacttctgcccacattgatacagagattcaatgctattattaaaaagtcactggaggtagtgtgaggaaattgacaagctgtttccaatactgacatggaaattacagggacctagaacagcaaaaatatcttggaaacgaacaaagttctttttttaaaatcttattacacaatcaaaataatcaaacagtgtggtatttgcaaagcacaaacaaacagaaataaaagaagttagagtccagatattgagttgtgcatgtagagacaaagggttttcagcaaaggaaccaagaaattcaataaaggaaataaattcatttcaaaaaatgatacaaatgtggatatctacatttaaaaaaatacaacttaacccctaaacacacatcatagataaaaattaagtcccaacagatcatggacctaaaacataaaatctaaaactataaaacttgtagaagaaaacacaaaacaatattttttgtaaacatagggtaggcaaacgttcctagaatacagaaagcataaactagaaaaataaatagagttttaatactagactgcttctgttcacctaaagacgccattatttaaaataaatatgcaaaccaaagaatgggggaaaaattgcaacacatattttgacaagagacttatattcaaaatatgtaaagaactcataccactcaatgatttctttaaaaagcagtcacctccctcaaataggcaaaataatttaacaaatacataaatggacaataagcacatgaaaagtactcaacatcttttatcatcaaggtaatgcaaattaatgcctgagatataaatacatatcaattacactggctaaaaataaaactgactatttcaaatgttaacaacaatatcaatcaaccaaatctctcatatatttctagtggaaatgtaaaatggaacagctactttgagaaacagaatggttcattattttaaagtaaaacatatacgataataccagcaatttcactcctaggtatttatcaaagagaaataaaaatatatgcccataataatgacttgcacatgaatgttcatagtagcttaattcataccagccaaaaattggaaaccacccaaatgtataaatgtgtgtatatttatacaatgaactactaatcagcaactaaaggaaggaactacttactaatttatataatgacatgaatgaatttcaacaacattatgctgtgtggaagaattaagacacacaaaaaagcatatagttcagatttcattcatatgaaaccgaagacccaacagaactaatttgatccattcaatgcaattcctatcaaaatcccagttggctttttttttctttcttttttttttttttttttgcagaaatgaacaagctgatgctaaaattgatatggaaatgcagatgcaaagagcttagaatagaaaaaaatctttaaagaaaagagagaacacacacttctcaattccctcaattctaaagtttactatagtagtatttgtgttatttgattactacagtaacctagagagtttgttactggcacacagatagactaatagatcaatgtaatagaattcaaagttcagaaacaaaccttcacgttcatgttaactgatttttaaaaagagcaccaaagcaattcaataaagacaaaaatattcttttcaacaaatgatgctaggatgattagatagccacatgcaaaagaatgaggttggacccattccttaagccacacaaaaaaaataattcaaaaaagaccacagacttcaatgtaaggaagggctaaaactataaaacttttacaggaaaatcttcatgactctgggttagttaaagccttcttagagattataccagaagtaaaagcaacaaaagaaaaaccaaattgaaattcttcaaaattcaaaacattcatgttttaaaggacaatatcaagaaagctaaaagaatgcctacagaataggagaacatatttgccaatcatttctcgtaacagactgatacgtttacaaaaacaactgcacaagaatttcatagcagccttatttgtaatacgccacactgcaaacagcccaaatatctgtcaaaaggaacgtggataaacaaattgtagtgtattcataaagaaacataccactcagctattttttaaaaaccaagctatagttgtccccgcttatccacagggaatatgttccaggaccctgaaaccacatgtagtaccaaaccctacatatactatttttttcttataatacacatgtacttatgataaaatttagtttctaaattgtgcacagttaagagattaacaacaataataaaatagaatcattacaacaatatcctagagtaaaagtaaaataggtgttccttggaaacaagcactgagataccatgatagttgatgtgataaccaggctggctactaagtgactaacaggcagtggtgactacagcgtgaatctgctggacataagaatgactcacatcgtcagacagcacaagatgccatttgatttcatcacgttactcagcagggcacacaatttataacttatgatttacttacaggatgttctactcaaaattttcagactacagctagacacagataatagaaatggcagctactgaaaccttagataaaagaggactgactactgtaccaagacacacaaaatatagatgaatctcaaaaacattaggttgaagtaaagaagccagacacaaaagagtacacactgtaaacatttacataaagttcaaaaacaggcaagactgatacatatattacataaagtatatcaatgattgtttatgcagtggtgggtatgtggctgacaagagttaaaagagaatttattgtggtgataaagatattctatacctggatcagggtgttgtttcacaagaccatataaactcatcaaattagacaatgaagacatgcatttcaccacatgtaagttttacgacaatttcttaaagtaaaatggaaagaaagtatcatgcttcatggtgtcctatgcttctccgcctcatttcaaaaacaacacagagacatagaaggccattccagccacaagaggaactaggagattctgcgcttaagaaagttgaaggagaactacaaaccactgctcaacgaaataaaagagaacacaaacaaatgcaagaacattccatgctcatggataggaagaatcattatcatcaaaatggccatactgcccaaggtaatttatagattcaatgccatccccatcaggctaccaatgactttcttcacagagttggaaaaaactactttaaagttcatatggaaccaaaaaagagcccacattgccgagtcaatcctaagccaaaagaacaaagctggaggcatcatgctacctgacttcaaactatactacaaggctacagtaaccaaaacagcatggtactggtaccacaacagagatatagaccaatggaacacaacagagccctcagaaataataccacacatctacaactatctgatctttgacaaacctgacaaaaagaagaaatggggaaaggatttccctatttaataaatggtgctgggaaaactggctagccatatggagaaagctgaaactggatcccttccttacaccttatacaaaaattaattcaaaatggattaaagacttaaatgttagacctaaaaccatcaaaaccctagaagaaaacctaggcaataccattcaggacataggcatggacaaggacttcaggtctaaaacaccaaaagcaaagataacagaagccaaaattgacaaatgggatctcattaaactaaagagcttctgcacagcaaaggaaactaccatcagagtgaacaggcaacctgcagaatgggagaaaatttttgcaatctacccatctgacaaagggctaatatccagaatctacaaagaacttcaacaaatttacaagaaaaaaaatcaaacaaccccatcaaaaagtgagcaaaggagatcaacaaacacttctcaaaagaagacatttatgcagccaacagacacatgaaaaaatgctcatcatcactggccatcagagaaatgcaaatcaaaaccacaaagagaaactatctcacaccagttagaatggtgatcattaaaaagtcaggaaacaacaggtgctggagaggatgtggagaaataggaacacttttacactgttggtgggactgtaaactagttcaaccattgtggaagacagtgtggcaatccctcaaggatctagaactagaaacaccatttgacccagccatcccatttctgggtatatacccagaggattataaatcatgctgctgtaaagtcacatgcacacatatgtttattgcagcactattcacaatagcaaagacttggaaccaacccaaatgtccatgaatgatagactggattaagaaaatgtggcacatatacaccatggaatactatgcagccataaaaaaggatgagttcatgtcctttgtagggacatggatgaagctggaaaccatcattctgagcaaaccatcgcaacgacagaaaaccaaacactgcatgttctcactcataggtgggaactgaacaatgagaacacttggacacaggaaggggaacatcacacactggggcctgtcatggggtgggggaagcggggaggaatagcattaggagatacacctaatgtaaatgacaagttaataggtgcagcacaccaacatggtacatgtatacatatgtaacaaacctgcacattgtgcacatgtaccctagaacttaaagtataataattaaaaaaaaagaaagttgtcttctaaaattcttgccttatttgaaaatggaacaaaccagtataaaatctccatgtttcctggaagaatgctatctctgcctccggtatctgacttggaataaaagaagggaggaatttacctaaatctaagtgtcggcagtcctggagtcagcaggggttacctggagggcagagtgctatacaaaaagaatacgatctttgggaatggtatttttccttgaaagaatactaggaaaatctaaaggtttcaaaccattccaacttttgaaagatagtttaaagttggactaaatcagctatataaatccacagcattattctgaagatttctttgcaaattcctagaattttatctctttacaagtgttttatctgttggaataaaaaagagggtgtttaatttattaacttggttttatgtaaccttttgctcaacagaagttattgctttttacaatatctactctctatcttttaccttcacagtttatgaccctagtgtcaggcttagacgtgccttcactaaccccagatcataaaaatgaaaaaacatattctctaaaatttcccctaggaaagctaatattttcttctactttcttgtgtcttcttttctgatggtattatggttttatttttaatttcagcatttttatttaaattttctatcagattgatactgataaaatattttaaatactcacaaaatgagacatcagttaataccattcagatttcacaatttttaaacagttttaggatatctgcttcatcaaaacattaaataaatggacataactgaagactcccccccatcagaggtatccaaatttggcgtgtgttatttccatacatgttagatttttttatgttgtttttcacatccgccaagttcacacacacagatcgacttcattttaactgctggatattatttcactgtttgaagaaatcagtttattcatttgtcctcctgaggggccttgaaattgtttgactttctcatttttagaaacagtgctaaagagtaaatctttatatgagccacgtttcgcatatgttagtgattttctaggactgaaacatgtaagtgggattgctgggtcacaggctgtgttttggcttcaagtttactgggaaacagaaattaaaactcccactgacaatgtagaatttccatttctacatatccttgcctactgatgttttcagacttctaaagttttcccaaataaatgggcatggggtgctaacccagtgatgttttgacttacaatgtgcatttctctgaaagagaaatttcaatgtttattggtcatgacactttcctaccagctagctttgcatattttacaagtcttttatttatccaaaatttacttttggccatggtgtttgatagcaatgaaatggtatcatttactatataaattgtcacagcaagccaggcatggtggctcacacctgtaattccaccactttgagaggctgaggctggtggatcccttgagccaagcagttctagaccagcctgggcaacatggtgaaaccttatctctacaaaaaaatttaaaaaaaaatagccaggcatcgtggtgtgtgcctttagttccagctacttgggaggctgaggcaggtgggtcgcttgagcccaggaggcagaagttgcaatgggccaggttgtgccactgcactccagtctgggtaacacagccagactctgaaattagatagatagatagatagatagatagacagacagatagataaagatagatagacaggcagacaaaaattgtcagagcagccttttaaaattgtccattttattctcactaaattgtaattctacttccattatatattcctatatatgtgtgggtctacttcaaggtttttcattctgttctctagtttacttgaatatctttgtcccaacatcacactaatttgctttaccttcaaaataaatcttcaagtgtagtgggacaccatatccttccattatcttcatttataatcatgtcatatgtatttaaacttatatattttcatagtaatatttgtattagcttgccaaatgctgtgaaaaccttcttgggattctcattaagattatactgaaagcataaatcatttgggggtaagctgatatctttatggtattccatcttcccttccatgaatatgccatatatatatatctctttttatatccattaataattttctccatcaatatctcatacatttcttcttagatttattcctatatgccttttttactattttaaatattatagtttaaaactatattttctaagggctgatgattgatatgtaggaattctattaattcattttatatacagcaatcttctaaattttgactaaagattcctttagattttctacttagacaatcattacttgcaaataatctaaactatgctttttgcccagctcttatactacttttcttactccagtagctaggatcagaagtacaacaataaaatgaggcaatgacagaaggcgttctagtctggttatggtttttaaaaggaatatttctcacatttcatcattaagtacaatgtttactaaagattcttagtggggatatcctttatcaatttaaggaaatttccattttttaaaaaaattataaactaatattacattttatcaaatattttatactatgtgtgttgcgggaagtcagggaccctgaacagaggtaccagctggagccgaggcagaagaacataaattgtgaagatttcatggacatttatcagttcccaaaattaatacttttataatgtcttatgcctgtctttactgcaatctctgaacataaattgtgaagatttcatggacatttatcacttccctaataatactcttataatttcttatgcctgtctttactttaatctcttaatcctattatctttgtaagctgagaatgtacatcacctcaggaccactattgtacaaactgattgcagaacatgtgtgtttgaacaatatgaaatctgattgtaaaatatgtgtttgaacaatatgaaatcagtgccccctgaaaagaacagaataacagcaatattcagggaacaagggtgactgcttgcagggtcaggcagaatacagccatatttttcttcttgcagaaagcctataaacggatgtgcaagtaggagaaatatcgctgaattctcttcccagcaaggaataaccctgggtaaggaatgcattcctgggggtaggtctatagactgctgctctgggagtgtctgtcttatgcggttgagataaggactgaaatacgccctggtctcctgcagtacgctcacacttactaggattgggaaattccagcctggtaaattctagtcagaccagttctctgctctcgaaccctgtttcctgttaagatgtttatcaagacaatgcatgcacagcaggacatagacgctcatcagtaattctaattttgccttctccttgtgatctttattgccctttgaagcatgtgatccttgtgaccttctccctgttcatgcaccccctccccttttaaaatccctaataaaaacttgctggttttgtggctcagggttgtcatcatggtcctaccaatatgtggtgtcacccctggagacacagctgcaaaatttctctctttgtactctttctctttatttctcagaccaactgacacttagggaaaatagaaaggacctacagggctcttttgggggctggtttccccgatatatgtgtattgagatttgttttcccctttaatctattattactgtcaattatattaatgatttttccaatgttaggcagtcactgcattcctggaataaataccactttaaataagccttataaatgtgggctggtacacagcaccaagatcttggtttcaaataactctgtccattaacaggaaccaggtgaccttggaaaaattgctgattctaagacgggggtaagaaatacccaagataagcctggagcatcttacaatgccagaaagaaagaagaagtgctaagagaaaaaggaaaaacaacaacgacaacaacaacaacaacaaaaaacaagatgggagcatgtcaaaaagaccaaaagctaggataaattgagccaaaaaataaagcagtactgctttacaatgcaaagtataaaataaataccaatgcagtcatataaataaatgattgaataaataataaggaagaagagacaaacatcccatgcaggagaattcaaaataatttctgtagatattccaccctcaatgaagtggagcatatttcccatgtccataagtatgcgctacacatagtgacttcctcccaaagagtacaggagagaaagggtggtggggtggcaaagagtaactttacagcagagaaatctgacagacactacttccgccaaatgaccaagattcatctcaacagtgacaagctgggccaggtgtggtggctcatgcctgtaatcccaacacttcaggaggccaaggcaggcagatcacttgagcccagaggttcgagaccagcctggacaacatggcgagaccctgtctctacaaaaataacaaaaattatctgggcatggtggtttgcacctgtagttccaattactcaggaagctgaggtggtagaaactcttgagcccggcaggagaggctgcagagagctgacactgtaccgctgcattctggcctgggcaacagagcgagaccctatctcaaaacaaaaaaacagtgacaagtcatgttgataatatatacttttgatatggtgtgataaaaaatggcaatttaactcatggtttacttcccaaaaatatacccaaatctaatcgtcagaaaaacatcagacaaatcccaatgagacaaatgccacaaaaaacctaaccagtacttcttaaaactaccaagttgtcaaaaacaaggaaagcctgagaaactgtcaaaaccaagagaagctttaggagtatgataagtaaatttaatgcgtttcttggattggatcctggagcagaaaaaggacactacagaaatctggataaagcatggacttcattaatagtgtatcaatattagctcatcaactatgacaagtgtaccatgctaatgcaaagtattcataatagagaaaactgggtagaagatacacaaaaacactctagactatatttgcaatttttctgtaataaaaagtgtttattttttaaaagtgagttgaggatctcattttctattttcaggactagtttgcgtaacagaactttcaacagaaacgtataagcagtcaagtaattgatgcaggttgatatgagcatttgtaatatggtaagggtagtaataaaggctgcactgttcattaaatgatgtcgaaaaattagctattaatttggggaaaaatttctctctgatctctacctcatgtcaaaataattccatctgaaatttgcaaaaaattacattaaaaaactataaaagttctagaagataatgagaatgaataccttcatactcttggggtaggatggaccatttttatgcataccaatattgaagacaacactgaagtgttaaggacagaagaggcctctcagtaaactgagccagtgatatttcagcacaagctgaaacaacctcccagaatgaacagaaatataatctcagagagtttgtaaaaaatactgaacagtaagtatgaaaaacggtggtggcatttatttcctggaagaggaaattaagaacaaagaaaacaaatataaaacatctagtatgctgaggaaagttgccaaaaataaagatctgagttaacagaacaaaaaagcagacaaaattgactaaacaaacaaacaaacaaaaaaacagtgaagtaacatgtccaagctaacattacttaggtaactactggtggggatggactttggatccaggctggtctcactttcaagctcgcattacttctacttctacatatgcgctcacttagccattaaaaagaagtcatcttctttttagaagaaaatgcagtgtggtaccctgtactggatcccagatcagaaaaggaacattgctagaaaaactgctctaataaagtcttaagtttaattgtagtagtataccaatgttaatctcttagttttgacaattacatcatagttatgtaagatgtttaatgctaggggaaacagagtaaagggtaggcaggtgtgtaacttttctgtaaatctaaaattatttcaaaattaaaagcttattaaaaaataaaagaaatctcagccaggtgtggtggcttatgcctgtaatcccagcactttgggaggtcaaggcgggattacctgaggtcaggagttcgaaaccagcctggccaacttagtgaaaccccatcactactaaaaatacaaaaatgagctgggtgtggtggtgagcacttataatcccagctcctttggaagctgaggcaagagcatcgcttcaaccaaggaggcagaggtcgcagtgagccgagaccgggccactgcactctagtctgggcaacaagagtgaaactccatctcaaaaataaataatataatataatataatataacataatataatgtaatgtaatgtaaaataaatctctcaaaatgctgctttgggactatcttaaaacttgtaagtgtagagatttattgcataaaaccaaattttaaagaggcatgctttgtattgaagattttgattataacaggtttgttgatgactttaaaaataaatatcagcctcaatttaattatatagcttttctgtaaagactgcttacataatttcttctataccatttttcctttcatgtgaataaaaatataaaaaaaactgtaaacagtagtctctaaatacacatggtgatctagttgtgatgaactgttttccatttctgctacagacgtaacaaaagttctgtgaaacaaaccttgtaacagcaataattaaatttaaaggattaatagaacagcctgattttttaggagctgtcagatactgaaagaatcaggacttcagaaataaatgaattctaggagcagaaaagctgaagcatataattaaatagaaaagtcagaagagtttgactatgcaaaggaacagggagaaatagttactgaggaacagggagaaaaactaaaataaattaatgaaagtcagggctcatggtgtctccaaggaattgaaatgtgacaaatcatggaatgggaagggagatgataagaataaatatgaatagtattaagttcaatcacttaatacttaggccttgttagaagccctccaatggttcccatctctcaaagcatgagtcagggatccgttgagaccttgagggtgcacccattcccccaaccctccctacccccccaaccccatcacttttttctttctcttttactcttcaccttctcccctcactcctctcaagccagccctgcccgcatgcagtcccctggcactccaggcctttacatttgctgatacccctgccagaatccccctcccccagacatccccatggtaaaaactccttcacctacttcaggttttgctcagatactaacttttcagtgatttactactatgcctgttctattttatttatttatttagagacagggttttgctctgtcacccaggctgggatgcagtagtatgatcatggctcactgcaacttctgtctcctgggcttaaatgatcctcttgcctcagcctcccaagtagatgggatcacaggcatgcaccaccacgcctggctaattttttatatttctgtagagcagggttttactatgttgcccaggctgggctcaaactcttgagctcaaatgatcctcctccaatggcctcccaatactatgcatgttctattttaaatggtgagctcctataactaccaaactcccctaccctgctcttttattttctcatagctgcttctatgtcctaacattttaattacattgaatatctgtctcaccaatcactagactgtaagctgtcagattttgcctgtgttcactctttctccagtgcctagaatagtgctgggcacataataaatggtttttttataaacatttgcctaaccaatcaatacaaacgtgtgatttttcattaccataattaaaattagaataatgaaacattcgtaacttttccaaagtcattttttgagcaactgggcttgtccttgtgcctgtgttttctgggtattttctacactgaacttctataatgttttaaaaaggggttttgtctttgtaaaagactagacagctgtctgagatcatttcaactcaagtacattcaatgtcagagtgagaaagaattaaagttcattctttcaaggcctgttcttcctgtgagcttaaatgaaatttagttattacctgaaagagattcatatcacgaaaacttcacacgggcaaatgctcaaaatcatgatccactaagttaaaggaatcacaaaattcccaccttcccattttaaagatgaggaaactgacctacgaaagttaagttacttcctcatattcaactagaacgtcgctgacgaagtggtgagcaggagctagtcttaaacaaaagactgaaacattacagaatgacctagcccatcaacattttgaaatgcagtgaaaagtccagattggaaatgctcagtccaccatccaactaggcctttattttctccctcttgtttccatttcattgctcaaagatgcttgtgaaagtttccttatttatttgtttgtttttgggagacagggtctttggagtgcaatggcacaatctcggctcgctgcaacctccgcctcccaggttcaaatgattctcatgcctcagcttcctgagtagctgcaattataggtgcccaccaccacgcccagctaatttttgtatttttagtagagacagggtatcaccatgttggccacgctggtctccagctcctgacctcaggtgatctgcccacctcggcctcccaaagtgttgagataacaggcgtgagccaccacacccagccgtgaatgtttcttcataccatttgaacattcaagattctttctgcattaagatccctagcaaaataaacactgtgatcaccttcctaagtattttagcatgttcaagggccactgtgccttccagaccccactcaacatttggcatcttactctagccctttgatttccctgttgacagaagtatgaggccagcatattttacaaatgtcttacccttttcagtggatggcctgtcaattaactctcatgaaatcaaatggaagcagacttcagggtataaaaatgtactacttatctaattcttttactgaaagcttgcacacattccattgtttttccataagtggaggaaaaaataaatctggtgctgtattttcgtttcagaagtagcaacagcagttactccacgcatgcattccccaggtccccagacagtcatctctgatgttataagaggcacagaggcagatacttcggcaaagacagtctataaaatgaagttgctatggaccaaaataactgtattgatttttagtacaattcaaaatacaaggaaacatcagttttccaaatggcacaagctgaaaaggacaaggaaaaatatattgcaaatagtgaagagaaggaaaataataaagacaattacattagcaaacatcttggtgttcttttttcagaacactaagatggctgttgtttgttttttaagttcaaagagctgagaggtttgaattatgttgaactgttgctcatttgtggacattgtgcccactgctggaagtctgaccttcagaaaacaaagccttataatccttggacatgtgaacatcttatttaaagcctcatttttttttcaattaatatctctcactctgatggcaaatggcagagctgtataaattctattataaatacatcatttgccaaaatatcattaagtttgctgcaagcaaatattttccttagatatccttaatgaggcaaagtagctttcaagccagagacctctggatgttgtggaatgaggggacggcagtcaggacttaccatggccccctcacttgttctttgggcaacttctcgctgtagtcgggccactgccaacttctccctgaagaaacaaaaacacatgattagttgaccattctcagggtagaggtgacactggcatggccgtgaaacattcttttgaggtctctagaggaattccttccttggtttagctcacttcctcctctatactttctataaatatttaaactgattggtcatgaatgcattgttttcattgagtgtcatgaaatttgccatagattttacaatagccaaataaacgttaaatggtgagtagatgctttgcttttagttcattaacatatatcactcacaaataaatttttcatggctatagtattttagttgacttttctctatcaactttgcttaagcatttttaattatttttatttcttttgttgctctccacaccaataatattaagaagcaaacaaaatataactccttactacttttaaaataacaatagaaaatcatttgcatgcttgctacataacaggcatcatgctgggcaatgcacctgttctcatttgagcctgacaacaatcccatgggtgatttcattatgcccattttatagatgaagaaactgaggcccaaaaaggctaatacactgagtcctcagctggtatatagtagttttttggaatcaaattttagatttccttacttcaaagcctaaataaaaagtctgcttatcatttcttcagtgtgtaggtaatataaaatgtagacttaaaaatcagattatttatttattttagtactccttatttaacaatggggttcatttttagatcccttataattctgctttcacttaaaatatatccaatattcaccaaaatttttagaatacttttgtaaagtgatagatgactgcattttggacagcttttcaattgttctttaaaataattgattagatgtcataggggtaagtgaattcttctggtaatccctaaaatgttagctttagtaagtatttcccctgatattcttctactactatactactatcaagatgagaaattatttgagtgacatttcatcccttagtcttctctttgcccaggatcagctatatgcaatcagctatatgtaaacataaaggatgcagttcaatccccagaaaattttcccactggggaaaagagaagtgaaaacttcttctctcctaagtgcttggatctttgaaatgcctaggactaccaagaagacacgtgcttttgtttggttgcagctgggcagtcttttagtagaaatagttctctctgaataaatacctaaaggcacagactagaagaagggagactagactaggagacattccaggtatacaagttttgggagcctgtggcagcacctgtgagtacacttctaagaaggggcaacagagtagataggaaggagccacaaagggatggaagccatgtagagaggccaagtaatcaaggcagaaagctcctgtgtgttctctgactcaagttctgatgaacagatcaaataagttcaatgaaaagaacaaattaagggaacaaataattgaaaaagaaggatatgaatgaattctgttttaatatgaaaattaaacacatgaatttatctcttctctccccagaaactgttaaaaatgtagtatagaggtaacactggcaaatacttataaagtcaaagaaaacaggagaatcacatactccatactctatgaaccagcaattccactctgagctctaaactgaacagaactatatgttcaccaaaagacatgtaccagaatgttcataacagcactttagtaatcttataagctgaaaatgcacacacccattaacaatagaatagatatgtcaactttagcacagttacatgatggaatactatacaacactgaaaaggaataatctacacttaatcacaacaatgtatggaatactgcaaatatgctgttgagtaacagaagcaagtacaaaatgtatatactttatttcctatttatataaagtgcaaatagaagcaaaactcctataccatttgataagacaagaaaaagaaataaaatacatggatatcaaaaaggaaggggtaaaactgtctctatttacagatgacattattttctaagtagaaaatctgatgaaatttactacacaacttataagtgaatttagcaaagtcagaggatagaagccgatgaacaaaaattaattatattttactagcaacaaacaattggaaaataaaattttaaagcatctccttctaataatgtcaaaaattaaaacatttagcaaaagatttgcaagacggccacactaaaaactacaaaacactgctaagaaggattaaaggagactaatagaaacatatatcacattcatggattgaaagacttaatattattacactgtcaaaatctgtatcaaataaatctataaattcctattcactgatacatataactctaccaaataaagagcaagactaggtaacgagaaacaagaaatccaataaataattggatttttttttcttttcttggtaaaaagaagctcctggacaacagctgtgtaagaatccagagaataaccaatctggactgcagcaagaggatggagagcctcaggaggatgactccaagaataaaacaaagttgaaccaaaataaattacctatgtgttcgtaagtattgagaagagatgtagagttttattttaaagcttaagaacaagaaattggaacatgaaaacgtaagccaatggcaggaagtgacaattattcatgctagtaaaaacaaagttattctagaaatgcaattctaaacttctactagactcagctgtgaatgacatttatcattttaattattaactaaattaatttactatttagtgaaaaaagtagagaaagggaagcacagagaaacagttggtacagaaacactaaattcttatcttccataatagaaagataatacataatgtttaaaagtgatatagaaacagaagttcaggcatataattcagatacaaggaggcaaaacttagaaggtagatctagaagaaggagagtggctgtgtcggaggagtaagatgcagaggtagggaaggcagtgtgtacatcttacagatgttaccattgcatttgatttccaaagtatgtgcatgtactactttgattaaaaaacttcgcaaaacatgtatttttaaaaaccaactggctcatgttatttttattaaaaacattataataatgcattactagaaagataaaggatagattattcaccaaccgaagattcagcatcaaatgactcattgcctcggacctgagaggcacctattgagaagctttggtaaattaaggcaaaataagaagtcactataagcaacgagtctttggacaaacgtttttaagtacatactgcaaacagtttaacatgttacagagatattttaaatttaaaagtttctctttacttttgtaatgaagtataaagtacgcagaaaaatatcataaaagcacaggttgctgaataatcacaaagtgaacatgtccgtattagtcccacctaaacaaaaaaacagaaacactgccagaacaccagaagctactttgatgctaatgataattaacttcctacaccaatacctgaattcacttgccacactcttttctctgtatactgaaacatggagatatttaacttctcatctaaagtatattaaacacattgtctcatattttactcgactgtttattcaatatatttttcctctaaataagaccataaattcctccttgaccacaacagtagcaaccaaaaatgatgatccattcatttttgcaggtggtcagttgtggcgtagttagtatcttactgtaacagccggttgcctgagtggagattatatttagttcatctctttaacactactaaggccccttagtaggaacaaaataaatatttgtgatttgctgaatgaggaatcagttacagaatctaataccaacttgcctggcataacagaattttaaataatattaccatcttgcatttacatagtacataacgcaggtacactgcacacatataccctgattcccacagggtatcctctggttctggttaaccacaaaagcttttttacatacattctaaaattacgaaaagtacaacttccataggccaccagataaatatgtgagtaagcttcaacagagtaaattcctaagtaagagcactgaatgaggggactgtagaacagtaggtcccaaatatttgaatactgagttctcaaatatttgatccttttgtatgcagaaaaactgaggatcccaaagagattttgttgttatgggttattatctattgatatttatgacatataaataaaaatgtaatttattaaaatatttattaaatcaccaaaaagccaataaacccatgccaacataagtaaaacatttttattaaaagtcatcctaaacagtaattccaaaacaaaaatacactttgcaaataaagggaaaaaataaattttgtgagaagaatgatactgctttagaattttgcaactctctttaacgtctggcttaatagaagacacgtgtattttcacatccgcttcagcatttaatctgttatgacagaacatgtcataagacttctagaaaactccactcatggaagctgagtggaaaaggcaaatatcatcttagtgttatgacaaaaatagttttgatcttgcagttcctttgaaagggtcttggagatacccagggtcccaggaccaaactttgagaacttcaactgaaagacagatacggaactaggaatgtaagaatgttctagaaaattgccttgaatcctcattcttaattgttgaagcttcagagaaaggtttaatatatatgttaatggtatgttaatttctcacaagagcagtgtaacataaaagagacatttccaggaacagatcaaaagccaatcttatccccaccatcctactaaatgataaaagagtcctaatacagtgtaaatgttaggaacatcactactttatgcttaaaagagatggcctttataaactattaggactgtcacactgtaatgtgcttctcaaatcttattaattcaatttgaaagaaaaccataatggttttagtcattacatagtttttaaaaaggaaaatactatattaataaatcatgaaattttgtagactgtccacacattatattctttggcattcaataaagaaggaacaaaatgaatgaatcaacacgaatgggctatctctaaaggggcagcattctagccacttgatttggtgaaacagagagtaaaatacataaaaactagaaacaccgttttatatctgacctaccacatgagtggaggaatgcccaaattcaaacagccacgtggaaacaggtgatgcaaacatggaaaatttcagagtagtgtaggccacaggggaggcaatccccaaccccagcccggctgctagccttccgtatcgacaactggggaaattgcctaggtgtagacaactggaagttaccctgactcagggcagctaggtgatgaaggagcagaatttgcaagaacagcaaacacaaatgtcttttggggaccatgctccgtaattgttttaagacatttatgcaggaaatgcaacctattagattatccaacaaagatctctcaggggtccaagggacagttcaggggcctcccatggagtcagtgggcaaagccagtggcagctaagtcccacgacagcaagagcactccaactctaagttattttatatattaggcttctgaattatattcccttttaaaagtgggtttccaatgctaaaacacaacaaataagggattcctcagtaacttgtatattccaaatatttcaagtccttgtgtgtacattttacatcagctggagttttttttttttaagtagaatttgtattttatttttgcatgaaaacgttatttttgtatgaaagggtctttcttttctaaaactaaggaagtggtgaagttcttgacatggtaaaaacttctatgataaaatactcagtatttctagatgttatttctggaatcaaattatcaactcaatcaaaatattaaaaataaatggccctgtctttttcacagaatctcatttgtccttgcgtttagtagttcctggcacgccatattttcaaacctccatggtcccaatatatgtgtgaaaccaattgggactagtatctttttcatgcaaattcacagttcatataaacagctttgtgtagaaaataaagaatgctggatttgcaagctacccaagacaaattaaatacactcacatacacatacacccttgctcccatttaaaggcctcagttcatctgctggaaacagacaactgtgcttctgcaatgcatcactgttttgttttgtttgtggcaaagccagtagctcattatgaagtgggtattgactttatgattgccaaacaaatgcacagggatattttatcaagagctgtggattcttatttactgaacaggtataaaaaaagaatataaagaaaatacaaacgatgaaacaagagaccacagtacttacttctcttacagttaaatgtaaagacaacttttctctccaggaagaatgaaacagagctactcttcttactcaattttatatccaaatggacaattagttccaggtttctaaagcccttcaatatagccccagactatctgaactaaagatcataaacaacattttataggttttatatattcttatatattcttcagaataccactgacacctctgcaagttaagcctgtggaaatagtgttcccaatgaagccaacaggatgttggcattcgtaaaattcagaaaagacctgcaaggtttgcatgtttaaaaaaaaagcattccccaaggagaaagcagcttgcagaggaggaatatattcagtttgtgttatgtggagacctcaggctgcagggtgctacagagccatctgttgcgagagtgtcccagggcatgcctgttgggagacaaatcaatgttcccttgccactcttcaggaagcccaggacttatacccaacctgaatgggagagcatggagatgctgtgtgccccactctccaccaggcagatggtgcccctgtgaggatgccctgatggaagagcagcaacggcacttagtgtaagtgggaagaattatttctactcattgttaagtctcacggtcacaaataccctatatatgcaacgcacttaaaaggtatgaatccagctcacgtcaagcaaactgttaatatgtgaaatactctgtgagttgatgaacatgcaggatgatctgtgtgatcacttgatctttccaggaaaataaagtataacaaataaacatgcttacatatgaatttaaaaaggaaaaattttcttgggcatcttagcaatccaaagtcagtttcctttactgtggtaaagatattgtgatattaaagaatcccataatactctccatacaaaactctaggttcatgttagttttgatttttaggttaagtttctataaagtatttaaaacttacttatgtttatgtattaaatacacctatattggtttttattaattcagaatattttgctaactgaaactatataatccaacaataatggaaatttttatgcattcagcaaacacttaatgtgagtttactacaggcctggtaccattctagggtctgagaaataaacacaaataataatacagttccaaattcaaagacttcaggattgatagacagagaaagcatgcctacgcacatgcctacacacgagtgtcataagacgcagtaagtacaacactctgtattcaaagccagattttaaaacatggtaggtggctattttatcaaaagatcaaatctgaacttcctttaaataagaaggcactttctgctatttctaagattttttcaatttcagacttttcagcaacaaattacataggagaacagatctgtcctcacaaatattttaattaggaagaatgtctatcacatattctatgttattctctaacttcattaagtcttttgaatgcaatgctgttagacttttgttcagcaccatggtctgccactttggtgccaggattttattccaggtcacttctttgagagatactggacctattttacttttgcatttaaaaagataaccataatagctgatatttattgaatagttgctatgtcaggcactattctaaacacttcacatgatatacttaaacctcagagaatcccatgaggtaggtattattatcatctctatgatataaaagttaatcaaactttttggattaagaacccctttacactctgcaaaaaaattactgagaatcccaaagagcttttgtttttgtcagttatgtctattgatacttaccatctccaaaattaacttaaaaatatatattaatttaaaatagcaatagtaattatattacaggttaacataaacataattataaaatatgactataattttcaaaaatataataaaacaagtggcactgttttatacttctgcaaaagtctttaatatctaggtaacaaaaatgacatctggattatcatatttgcttctattaatacattcaatatgctgcaatgtcacatatggagtggactctggcaaaccactgtatactcatgagagaatgagaacaaagaaggcaaatatcatcttagtattcttataaaattctaagtattcttataaaaattcttttaaaatattcttaaaaaataacatcttagtattcttatttaaacaaaatagttataaaaacagttttgaccccgtggatctctaaaaaggtcatagggcccccggaggctcctggtcaacattgctaacatgcagcaatgcctgccttccatggataaatggaggctgctcatgcagactggaaagcatgcctattatcccactgctcaaaagtttaaatatggccattcatgctttaacaaatatgtaaaatagcaatgaatatatatttagctataatcctatttgttagaacttgtgcctctgtagctaccattgcctgttaccactgtctctactgccagtgaggtcatcacaaataatgcaagaatttggggtctccatggacacaacacatttttgaccattttaatgtgaatcaatgggaaaaccaccattacaaatttccaggaacacattgaattccaaatactataaatccacatttttgcagagtagaagaaaaatactaatcaaactcccaatataaacctatgctcaggcataggttttgttgtcagttaacaaccccctccaccccatattgtttccctgtgaagatatcaccaaatgtctatattgaaattagatagatgattactctcatttatgccttggggtacagagtcatacactaaaatcttaaacagaagattcaattaatcatcaaccttccccatttctggtggatcccaagaataagagcccggtggcgatctggtatgcatgtggggagaacaggtttgctcctctgaggaggccaagacccattctctccccacacagaagtgccctggggagtcacccgccgcagaggccatgacaatgtcgagtgccaggtgcacctgtcgtgtgggcagatggggagaccagcgacggcagtccctgagtaatggttaagttaattagcctttccatggcagatcatttaattactcatcccctctgacagggtgagaggagattttagaaaacttttagagccgcaactcatatgaaagaaatgtctttatatacttttttccaatacgtaacatcactgttgcccccaaaactttaaaacagcaacaaaatcactctgattatatgctttaggagactctatcaacatccataaagcataaaagtcggtaagtttagagcgtgttctaagttgtggatcttcacaggattttgtgcagtgaggtcagtcagcaggaaactcaacaggactggcatgtaaaactcaccaacattggaaaagcacaagactttaataaattgcactatgccaattaaggaatgtaccccaatcctcccaaaaattaacacagagactttttaaagaattcagtgtgttggaatacagagatagttagtaaacacaaactaacaaaaatcctaattttagtggcctgactttctgaaggtgtgttatccacaggcttgtccttaactagctttctggagctcctggaaaataaaacgtagccctctacatccttatcctatatatgtattctcaaaattgttcttctgctctcaagaacggtgcctcgaatgacacccacattttcattcattcgttcatttatccatccatacagtcactcatgcagtccatgaagtaacaagtgccttcttacctatttatctccttagtgggaggtaagtccctagaaggctgtgactttgtggtctttctgcatccagagcacaaacatatccttaataaatgaacgatcatgcttcagaacaaagatggtctcactgacttgaggcaagattacaaacgccttcgctcatattcaatatcagaaactaatcgcatgttccagatcttgacaaaataagccaataaaaccacacaagctacctgtactccctactacaacagtcatatgtgtagcattttgtacattttagatgctccatataatattggtagtaaatatccagtgaagaagtgcatttgtccttctgggttttctcctttttatttctacttggaactgtgagctttcattagaataatatatgctttcatcctcaaatttttgataaagttggaagagcctgaatttagcacaatactgaattaaagtaacccattttctcctcctcctctctggtacagagtgaaatcccaaagcactcctacctaaaatgtttctaaaatacatattagagcaaaaattcgcctaattttaatacagatatttctaatcttaactcttgcaattacttcttcctcgagtgtaaagtcaaacacttcaaaaaaaagctttccttgagatatatacttcttataaatcattgaagaaacacttaatttcttaattattgtggaaaatctaggtttctgaatgggtattccttatgttgccacgctctctaagaaacttggaattccctatgtttccaggtatacccctgcctctgcaaccccactttgccaccctgatatttcttctttaaattttaaaattccactaaaataaatctaggtttgtgttatgtctgacaattaagacaaacttttaaaaacaacagaactttattaataatgttcaagttgttccatcaattttggtaacattcaaaacagatgaactatatgtagcttaatatggaaagggaattcttgagggaaaaaaaacatgctaatcaagcatgctaatcatctcctaaggagcattacatacctgtggggaaagggggtgacgatagcccttacatgacaactaatttagttttcacgactttcaattatctatgcctctgaaatctcattctgtctctgttttgacaacggccccaacatagtatctgtgaggaggcttgagccatttatctaggctcagaaaaagaaggtttgtgagttccaaagggaagagttgaaggaggtactgatggaatccctgatggactgtcacacaggaaagtttatacactaaaacattccttcatttgtggaatgatttacacacacgagggtgagttcagctcaacaaaatggtggttttattatcattatttttttgagatagggtctcactttgttgcccaggctagagtgcagtggtgtgatcatggctcactgcagcctcaatctcctgggctcaagcaatccttttatgtcagcctcctgagtaactgggatcacaggtgtgggtcatcatgccctgttcttttttttttttttttttttttttttcggagtctccctctgccaccaggctggagttcagtggcgcgatctcggctcactgcaacctctgactcccgggttcaagagattctcctgcctcagcctcccgagtagctgggactacaggcacgtgccaccacatccagctatttttctgtatttttagtagagacaaggtttcaccatgttggccaggatggtctcaatctcttgaccttgtgatccacaagcctccaaaagtgccccagcctcccaaagtgttgagattacagccgtgagccacggtgcctggctgccacactcaatttttaaaaaatgtttcttagagacacggacttgctctgttgcccaggctgatcttgaattcctgggctcaagtgatcctcccacttcagcctccccaagtgctgggtttataggcataagccgccacaccgggcccaaaaaggtggtttttaggctaaattggaaatgctatcaatctattccacaaatattatgttgcttactaagttggaggggctttgctaggctctatggaaactacaatgatgagtgagactcagttcctgcagttacagagcattcagtctcagaaaacagataacacacctatggttcagcattatgagttggaaagtgtcccccaaaaatgcatatattgaagtcctaacccccagtactacagatgtggctttagagataggggcctttacagagttaatcaattttaaatgaggtcactagaatgggtcctaatccgacaggagtggagttcttaaaaaaagggaaaatttgaagataaacacacacacacacacacacacacacacacacacacaggaagaacaccatgtgaagatgaaagcatacattgaggtgacacttctacaagccaatgaacaagaaagatagccagcaaaccaccagaagccaggagagaggcatggagcagactcagaggcaaccaaccttgtcaatgcatcttggacttcagcctccagaacttcaagacgaacttctgttgtgtaagccacccccatctgcagtactttgttacagcagctctgacaaactaatacatccagatatattttaatataaaatctatcaactatgtatgtttgtacataatccatctctatacaaatatacatatacacatagcctgggaagatataatgggtgctccaagcaaagtgtgatgtattttgggcagaaggagtatttgattccgaccaggagaatcaaggaaaccttcatagaggaaatggcagtcacattttacaaaagttaagagcacaaaagtcagatgtcaaatatgaaaatttataactctagagttataaaatctttactgcaaagtgggtttttttccaatctaaggaacttcttcaacatgccatttctcaagagttgaagatgactatatgaatgattcaaatggcacacttcatagctaaacatccacaggcacacataatctcagccatagacatttttggtatgtccatcttcatattctttttactaagtctactgctatgcccagtataagatgctacctcagtgctttattaggggaatattgacttagttcatattccagagtggagacggtttgcaaacacatgtatatactctctggctgccccattattggagcatatgttggccacttgtgggtgtaaggagttaggtgacctgtggtcttgaaactggtctgcccataaccaagccttcactaactcaggtctctacccaactgagccattattaaacctcaggagcactataaatttactgacttttataaaccattcaactaaatagccttctctaaagcatttggtaagagtaatttgatgctctgatcatctgccaattcattttatgagtccataacctaacagaacccatctcactttcctttcagagtcattttcatcattgagctttgtatcctgtttagattcttcttttctaatcttttcaggactgtatgagttggatttctcctggttgcaagtaacagaaacaaacttcaggtacaataagaaaggggaggtatttattgaatgcggtatggtatttcaggaggaactgaaccaccaaactctaggagaagcaagagctgggtaagcagcaggggtctctgcagcaagaatttatataccacttggcatgacactccaacgatgccctagttgagctctggggactcttggtttctattccatcagttccacgttttaattctctggagtaagatcctgattggcatagcataggtgaggtacacaccctgaagtgaccagctttgacctgggagcagggtcatatagcacagtcttagatgtggtcctgtcccttataggttgggggcagttctaagagaaggaaataattgttagagtctaccacatgggtcgaaaatttatacttctactataccatcctttctttgaaaagcactttttatatatttcttaattaatccttacttggacctgtagcaaaaaaataaccggatctctttttgtttttggaactcaatagtttttgcatccatttcaattatattaactccatttgaggtatgccattaaataccttactaacattgagcctacatcttgttttcttcatactatcttgaccccttcctagttattgtgacttaacaatttatattaagcacattcttcattcttccctctacaacacttaaccagcttaagtctatatatttctgtgtattcccactgtcaccaccatcagcacgttttatactgtgcacattcctagaaaagttaactatgaaacactgtgtacatgttcacaaaattgtataatattagagccagagagtacagtcttaggaggcacacaaacaaatcagaaagtatctttctgttctattcctatccttcacaccattaccaggaagactgttcaaaataacaagatttcaagacacagacccttttaaaagaatgtccattgtaaaaatccagagaataaaagagaaagccagacttccctatattctttgtaaaaaatcaaatcgtgaccaaatgtggacaatattcaattagtacctgatttgacaagtagctgaaatcaacaataaagtcaacaatgagaatcttcagagggaaaaataaaagaacctaataacagacagcctagaatcttaagagaggtgaaatgaatggaaccaatctgtaaaataatatctattccactacgtaaaactctgaaaggaagaaaaaattcttagatgtgtaaccacctaggacactctcaagagaggtaaaagtgtttcagaaaacaggaaagcaattggtgggcaaacaacaggaaatgtttttgtagaaaaaaaataggataacaaccaggcaggaaaattctgtcaaaacaggctactggaaactttctgtttatacataaataaatctaagtattcataattatcatctatttcactgacacagtgagagagaacaaaataagaaatgagggcatttcttgtatcttaacacaagagaggggaaaagcaaatagtgagttcagacacagagccaacaaaaagccacttcctaaaggatatgagatacccatcgtgcccgaaggcagatgatagctctggtgctgagcacagtctttgaacatattttgtttacatttaagataaaagaggataatgataatgatgaacacttataaagtaattacattccgagtactttacgttagttattaacttgtttaatccttaccccaaccatgacgtaggtgctattattttccccattttacagatgttgaaaataaagtacagagagattaagtatcttccacaaggtcccagagctacacctggacacaggcactcttggcaccaaagtcctcattcttaaccttaatgctatgctagcaacatgattctagctggagttatgatttttatattacatataattgttcagtaatccggacacacacacacaaaacctccatgaatttcatgggaacctctcaaaatccattttaattcatcatgggagtcagacactgttctgcttgagttcagactcccagctcttccacgtaccagctcactggctagggaaagttactcacactctctctgtgggagtgtatctttatttacaaacacacactgcccctttctgttgggaagattttacttccccaccccactgatactagacttggcatctcacttgttttgagcaataaatcatggataaaagaagcacacataacttctgtgcagaaaacactaagagccagacaagatctgccatgttctctcattatgatcagcaatggtcaagaaggacactggcctgggtcctgaagtgcatataccttggagcagagcagctgacccaccacaggcatctggtgggcaataaggatgccactgtagttataacccactaggatctggaggccatttattaccataacataacctcctctctccactcatatactctctgtgccttaatgtcctacctccttctagcgttgctgtgggcattaaatgagttatttttataaagcatgtagataagaaacaaagtatgagtgagccagatactaacctgaagagtgcaattagagaaaagaacactagaggaaacattaccaatactaatcaaatcaaatgcttttctggttctcaaatccttttgactgagttctaatgttacactggtcaccctgagagctttttgcaaacttcttctcttcaatgctcccttcttgatccagtaataacacatttatttacatataattcagggctttactcttgctgacccaaaggctccagacagctttccttctgcaaagtttggttgtttacttagaccatgaagatattcctccttttcccattttcctcttttccctcagctatctttttctgaaaccgacttcaacactagtttcccatatgtaggaggcaattttagtgagatattaataactggtatctctttgtttttacaggtaaaggattagaaatcactgtgacaagtttgtttcttgagtttttacaggcttcaatttgctaatgtacaaaattttataataaagcatcttaccaattaatgttccacacaaatggtttttaggggatgctgctgccaaccattccaaatatgttgtaatgagcagatagcaagacatctcatgcccaagggaaagatattgtgaggctccctccaaaccatcttataaatcatagactactacacgaaggtcttcgagaacaataccctcattttagtgacaagaaatggaggctcaaagaataaagaatggagaaaatggaggctcaaagaggttgagtattttattgagaaaaatcaaagtgagttaaagagtaaaactgattacaacagagtcatccatggattcaaactagtcctctttccagggatgactgtgtttaaaaggaaaacacatggaaatatgagtacctctgtctagactaaaagacatgtttaaaaccaatcaacatattcaccctttgttacctaacatcttactgggttttaatctggcccattcacaaaagtcaaaggggttactagggaaggtgacaattaacagagcccagtttaactacgctcatgtgtgaagcaggttggaagggatgaatcaggatctaggcttatctaaactaagatataacacagacagcaagttactcctgctatcaaaaggctttatttggtacttacttgctgtataaataactcactagctatttgctctgaaacaacaatgattagaatggctctcatatccaacaaaacactgaaacaggcaacagacagggtccatcaaaaaaaaaatactaacggtacctatgactgcttttcactgttaacagtggcaaataaaaccaaaagttattctgcacacttaccactctcatgatctctaaatttgcttgtctgaaagaaatgtaccaaagattaataaatcttacaagaaaacaaatggaacatgtaaattgctgaggagtttgttccctttaattttatgctagtcattttccgaaatccagaagaaagacatttgctaaagctttgtgtgtcttctagcaaaaatcacttcgcatgtaactaaataggtacagaaaggacacactttttaagtgtataatgataaaactcagatatgtagtgtatgtcattctcgatcacaaaagctgtgtgggttttctctgtttcttagctaagttctcctgtctaaaagacaaaagagaaaacaaaaccaaagagaaaaggattctgcaggcatctatacacaagaaaggcataatattcaaaagtcacagagccaagcatggcagtgagtctgtagtttcagctactcagaaggattgcttgagcccaggagttcaaggccagcctgaacaacatggcaacactctatctctaaaaatatatataaattaaataaatgtttaaaaatgttttaagtcacaacaaagaatggatattgtcagagatcggaattccatttaaaaaatatatttctgctttggagaagggctcaagccattgaaaagaaaaagaaaagcactaacagacaaagttaggaactgaaatacatttaaaaggtcaaagggaaaacaactagaaatgtcctacttagtccaaaaggaaagaaaacccagcaacaaacagggactctcacaaatggagaatgtctttagcacaatacaataagaccgttgtgtgtgacaccttgataaattaaagaaacagaaacactgtcaccaaaagaaaaggaagaaaggaaggaaattcacaaatagtgcccacaaaagatggataagaaagttttaagagaatatgagcactgattaaaggcaagcaagaaaaacaagataggctctatctagctaagcccctactgcacaagcctattgtcttatttcctttggcactgactacaagagaatttcatcatatgtctaataatagtattatttataaaatagaagaataacatcttgataagaatatacctcaatggcaaaatgtctccttctatataatctgagtgtatagatgaaaaagaaatgttttcaaagtaataacaattacaaggcaatcagtgaacgagataagcacttgcagaaggagccacattaaatctattcaactgactggcttctgtgttatgtgagtccaagaatggataactgctgctccctggaaaaacctgcagtgctgtaaaaaccagcccatgccactgtgtctgtgggacgaggaaaatgttaaagaagcaatagagacaaatgggaaaggctgacaacacaactccttatacttcttaattcagcattatattcattgacctattacgtataggtcaatatgaagaaaaaggattttagaaatcacacactcacagatatggtccctgccctccgaaagctagaagttgttaaacactactttggtcattgaccttaccaatacccattttatgcaagcataaatagtgtctaactctataaagttatgttcaacactggccagtatccctatattattttgctgacatacatacatattgcattgaaataaaaaaatcaaaagagtattttcacaagtccgagtttataaacaattgaatatattcatccatatataaacatctatattctgctgaatatagatgcttcctatttcctagtttcatatacattatatgtataacttaactacatttaaataccaattttatataccaagtgcagcctgatgagctatttcaaagcctatgttgacaatttgctagagttgggaaaaaataaaataccttcaacataattagctggtaagtaccacattaagccatcactgtgtagctgctactattctacatgcttttacatgcatcgtcttattgaatccatacaaatctcttctttttatagatgaggaatcagaacttccaactgagcagcccacactctaaaccactgtactatataccccttctccccacatacctacagaggcgatttctttggagcctaatatttgttggctattaatggaaattttactttgctgtggaaacacgatcaaaccaacaatgactcaaatcattgaagaacccatcaggactatcgaaagaagggccagacaaccagactaaaacctgggagcaaacacaggctccaaactgcagcagataggagcactcctcatgagagcttaagggaggatcgcatgagagcttaaggagttcattttgtgacagggtttggccagaagtgccagaatgtcaggaagggagactcttatgaaggggatttcaaggctggtcatcagtggagagaactggatagaactccaatttctgaaaggtctgatggccataacataagtcctttagataaacaaaagtacactgcagaatttcaagacattcacacagcatggagcaaatcagcaacaaagatgatctgaacacattgcggggctcttacatttctttcccaataaaactcataaccattaaacaaaatgtactagtgtgctattctgccaaactatgagaccattagttctctggaccctgacaagtctgccttgaaatacggcagatctaggtctccacaacactgattctccatgaggaataagctagctcttggaacactaattccagtactgaccactgtatgttctttaacatgtcgctcatatctggagaagtgtgtcaggaacaaaatataaaactgttcgcagattttctgactttgacctccatctctcagttctcggctatgggctaaactgtatgcattctttataattttccaggtgcttttgaaagaaatgtagttcatcctagagggtgacaagagaaggctttatgtcaaattttacttttaaaatagttacctaaagttttaaagactgactttacttttcagaaagatgaaaaatgttaaggaaagaacaaagaaaaaatacatttagacacagtaagcaattcattcttaagtaaatatttatataaataagtgtccctcagtcgagacttatgaccctggttgttaattggccttaagacagaaattcttaaggccagttaacaaccagggtcataagtctcgactgagggaccccatccaactcagtacatcctcaatgcacgttaggtccttggtagagtctcatggaactgaagctacttaacatctgagtcttggattccttatcttcaaactctggtgataatacagtcagtcttcattactcacacaattataaattggtaattccacaattagaaattggtctgctcactcaaatgtatttgcaaccccaagatcaatactcatgatgccttcactgtcccttgcagacttgcacagagcagtgaaagtgtgagtgaccaatgtgcacattccaaactgaggtcacgcaaggggtgacgctccacagctcttggtgtccttttcgtgatctatttagtgccactttttgcatgtttgtgctttctgttggtgactgtattgattaaaatggcccccaattacagtactgaagtactaagtcctcctgagtacaaaaaggcaggctgggcatggtggctcacacctgtaatcctagcattttgggaggcagaggcggtggatcgctttgagcttaggagttcaagacccagactgggcaacaaggcaaaaccccatctctacaagaaaataataatgccagaaagtggtggctcaaaatacaaaatacaggctgggcacagtggctcatgcctgcaatcccagcatgttgggaggccgaggtggcatggatcacctgaggttaggagttcgagaccagcctgaccaacatggaggaaccccatcagtactaaaaatacaaaattagccaggcatggtggcatgcacctgtaatcccagctactcgggaggctgaggcaggagaatcacttggacccgggaggcagatgttgcagtgagccgagattgtgccatcgcactccagcctgggcaacaaaagtgaaactctatctcaaaaaaaaaaaaaaatgcaaaaaaatggtggcttgtgccttggtcccagttactctataggctgaggctggaagattgcttgagctgggaagtggaggctgcagtgagccaagatcacatcactgccctgcaacttgggtgacaaatcaagaccctgtctcagaccaaaaaaaaaaaaaaaaaaaaaaaaaaaaagctgtgatatgtcttatggataaaatgtatgtgttagacaagcttcaggtatgagtcatagtgctgttggctatgagttcgatgctgatgaatcaacaatacatattaaaaaggagtctttaagcagaaacatacataaaacaccataaggttatgcactgatcagctaaaaaaccagagccagaggctcacaggaatctaaccctgtattttccttaggagcaatggttcagtgtttaaggtgacttcatagaacataactactatgaataaggagaactcagcatatataccctaccagttgtttttaggttctgaaaaaatatacaggttaatgacctgtgaagtgaccagcataattaggaacgcaagggattttacctacctataagtaaaaggactgttctcttaggtgtctgacaaacaccacaactaaaaatatcaaactgagatacagcatatttcatagatgatgataggaaaaatgaaatttcatttgaatgtatcacttaagtcaatacattagaagtgggaaatattaagatataatttaaaatccatcaaaaggcatttggattctaaatcaggttaacattgttagacaatatgctatcaactctgctaattagaaagtcacagccttttattcataagccttcaagtaaatccaattaaaatggaagttcaagcttgggaatctcagtcacaggtctattacctctataggcttcaattatgaagctgtcccgaaagtaggaaacacagggtttcaactcaaagtccacataagagtagaaattcaccatttacattaggtatatcccctaatgctatccctctctcctctccatgtcaagttaacgggtgcagcacaccaacatggcacacgtatacatatgtaacaaacctgtaccttgggcacatgtaccctagaacttaaagtataataaaaaaaaaagagcgaaatctctgtatcaaatttaaaaaaaagagtagaaactcaccaagaaatgctcctattggctgaatctagaaaatttactttatgaaacatcagtgcattgcttattttaaaaaaaagctgtactttgataccttgattaattatgacaaattattatattcctaagcagagatagattttttaattttgtgtacaagtataacaaagtaaacccttgcttgatggagttaagaccactttaatccagatctccttaattcagaaccaagaacctagacaagtatttctttgttctatgaaaatataagaataaaaggatagcaaaagaataagtgacattaaaaaaggctaaagttttagaacattgcattaaaaactgaagaaaaaacttcaagactttgaaagcacccatttacatatgactttatttattcattcaatattcattaattccacacacacttattgagttctgctctgggccagccatcagaaatccccaggagaagcagatactgaacagcctttctgaagctcacagtctagtaggtgagacacacgtgtaaacaaatgcactgcaccgtgataaagacaattgaagatgtaactgcaaagaaaaatgttactcagcagaggctgctgctttgaaaataaccctttaaaagatgtctcacctcagcattgaaggctcctcctggggacacactttactaactcagctctagttaataggaaaactgcaaaaatgatgcagctacaattctctggaggtaggagggaaacctcatgcactcagactggattgtaccagcacctctccccttcattctcaagtcacttttgccacccaaacctcaactaatggaaagtaaccaagttaaccagaaggtgaaggcacgggtcctgcaggaggtgtttctggctgttacaagcacgggaaggaaagctccaccactgtggccaatgaaaacttgtcattcgctctcatgcaaaagagaacacaacttccatcacttgactaagccagaggttaactcacttagtcaagtgatggaaagtttcctcactttagtttttctcaaaaaagtgacactttaattatatgagcacacctattttatcctttcttacctccccctctacttataaaacaatatatctgtgattctatgtcttttcccaggtttagaatctgagtggctcatgtgcttgaggctcctggagagaaatagaatcagtggatagaactcaatctcccacatgggtcatggcgaaggcagtggcttcaagcccagcctttggtaaagtctctggtagtatcactgccagggccacaggaccgcagagcctatagcattctctctatgactaactatagaaggctctcagtcttgtggatgagaaagaagctccttcatgaaatggcttgtctccctgttaaaaagaagacacaggcaccgttgtttttgcttattttttctcactcagtcagtaccatccagtacttacttacatttgtctagtctctcctaaacgacttctggaaaagactccaaaatctttttaagcagccccaactagctacattccagagcaaagcattctttatttataaatgaaagggctcagcagtagcttctagccttatctcactcttctctagacaagggggttccatgaagacatgttccacaggtaggtttgaaaaaacatttcaagtatcaggggccaaggtcctgcttccagttcctctaccacataaatgtttagtcctacaacctgtctggtcctggttttctcattacaaagcaagaggaatgaatgaaagagggtctgtaaaatccccttcccattctctcagtctgtatgtaacctggtaatatatcttctattccaggttaatagtgaaccccaattcctttatgaggtccttatgttatacatacaatccctaatgttaaaacaggatttaaaatactattatacagtccatcatgttggattcctataaatatgggtttttcatacttgccaatcaaattaattagccaaattcacttatcaaagtccatttaatacattatgtgctggcatcttctaaaatatgttcacttattatgtttactagaaagaatttttaatgagcagctgcctcaaaattaattaatgtatatagcttccactataaagttacaagccaaatcccactaatacaatttcagtgaatagctcagactgcaaaatacagcaaaactccaactgctagcccatttatttagagaagcatgtgaatcaacaaatttacaagagcatgaaacaagcagttatgatattcatgtagattttgagtactatattccgtgaaataccacaacatggaattctagcaaatcaaggaaactctattggtacctcatatcttcctgtatactctatacaggaagtagaaatacttttctgttatagaactagactataggaaaatcaaggtatttgactgtaccagctagattctgattttttctattctctaaaaatctcacaccaaagaattattttacagcccattaactgatttccttcaaatcctgctaccttttatttatactctgtttatgtgctaaattctaaagagtttctgaaggaaactaaagtaggttaaataaaactgaaacactgctttgccaacattttttaaaaatcaaagtcaggtgtaattaaaagaaaatgattatacagcttgctagcacttgttccatttttaagaacaaatgttcagacttacctaggggatgtttccatctgcttctctcagtttggtttccatgctttagctttaactattatatgtaggcaaattaccaatgtctgactatctaacaataaataaccctggccttatttttttttcaaataacccttaccaaaactgaaatcatattttctcaaatcatattttaacagctagtcttacattagccagaaaggagacctcaccatcacaatttggagaaaataaacacctcattattgataacactgtctagagttgcgcattccggagttacgaacttagccaccatgcagatagaatacctactctcctaaaggctaaaatccaaaattaatgtgaaggtgtattttaagaaatggtaaacaataaagataataaaatagtaagataaaaccattaaacagacacccagtggccaatatattacaattggagataaaaatatatgcatttctggcttaataagttagtgacttagaacagtacaagagtgacatggaatcacagaagtgacaaaacttggccacaacaaagccctgatgaaaagcaaattgctccaatacagtgtccgtacacttcacccttgcatgcccatctctgatgccccccaaagtagctgcataactgatttatttttcatccagatggctggcgtcctgtacagacttacaatgctgactgtcttggggatgcttattcagtgagtcttgaaagccattattcactaatttcatgtggaaatgaaatttcagcctcccattgtgtacgtataacttgggtacttccaccacatacaaaaagtgctttttgccaggcgggagaggatgactggaatgcaaaacccttcctgcatgcctccctggcccagacccaagctggcatatggcagttccaccaaccacctccatatagaacactaggtgaatgctttaagcaagtcctaataatgtgatttacaaagcactcactggatggctgtcttctgcctctattttcattcaggataggagattaatcttatttcatgaaaagcattttactacattctgtttcttgcattcaccctcctccctacatcttttttaaaagaaaaaacaattttgctaaaattctgtatatctaaaaagaatcatgagtttccaagttttcttaccttactattttcttattctagaacttaatcctcaacacaggatttactttctgtttcaagcctgtgactagcaggcaaagaaaactggtctttagagagcaagttaaacgttttagctaaattcatgtgctttgaatgaaacattcccacgctgtgcttataaacaactattgatattttctgtaacttcattccagaaattgtttgcttttaaatgtcagagagctctcttcctcgccctattttgggttttatttcagtcggcagtgttgctcatcagtaataaatacaaattcttatgtagagacacactcacatcacatgctggagctgaggagctcaaagtattttacaaacatgatcaaaatcactaatgacttccagctctggaatctgacttctggatctgtctcagaagacttatttacatcatctttgcaaaatataatttgtatttataaacacaggcatttatctagtacttagcaatgaatgcaagtcatagccctggcactgacattcatttccaactgtggttccaactgaacttcccagagatgtaagatatgactgtctatggtaaccttcctcctttgattctgaggagtaaacggcatttcctctcctcttctattttcatctactctgccacataactcttcctcaccagtggcatctgcagggggacaagccctccttctttcacatatcccaggaacgtggtttgtccactaggccttctccaggcttgtctctcagatatatgaatttcagaatgagatgggtgatatgcatgtagggatattttgcatattaaaagtaaaaatagccgggcacggtggctcacacctgtaatcccagcactttgagaggccgaggtggttggaccttgaggtaaggagttcgagaccagcctggccaacatggtaaaactccatctctactaaaaatacaaaaattagctgggcatggtggcgggtgcctgtaatcccagctactcagaaggctgaggcaggagaatcatttgaaaccgggaggcagaggtttgcgttgagccgagatcacactgttgcactccagcctgggcaacaagagcgaaactctgtctcaaaaaaaaaaaaaaaaaaaaaagcaaaaatgaccaaggcaaaatagctccattctgaattacacatccaccttctgaaggtaaccaatgctgtcagaatccagcttggtaaatactctgtttttcttttcttttcttttcttttttttttaactgagagaacatatacaaaatcaactttatcttatcctggaatcacattctactataatgaaagacagatagccttgtctcaagaaaagtaaaagcaagaaagtagctctagcatggaggtgatacccaaatataaacagggctggtttcagaatttctaagcaggcttccaagaaacaatctgattggaagcagaaggcaacctattggtcttgaagctacatttgcagaaccagatcacccttcttacttggattgtgggtttactaagagtgttggagtgggtagctaacggagattctacctttaactatattaatgcaaactgtggtatagccctggaaataatactgctactgcatgcaatatcatcagccagatctttcttagaagacagctccaatctatcgactttaaaagaaatacaaatgaatgagaaaatgcttttgaaaaacagcgaagacactcaaggatgcataaatgtaaactgacaaacatgtaaacaataaagcaaaagtgaatgtctatttctcctcctctcatatcttgcagggcactaccgggaaagtttttttatagtaggcctacatgatagagtactttgtacaaaagatcagagcatgattagctcaagcgttagatgaccataaaactggagttacacaatataccccaatgtacagtttatgtcacaaaataaaaagaaagacttcctcataatcatgtttctttcacattttaagtgtttggtgtttttgactaaccatattatgctataaaatcaaaagtaatcacttttagggtcctttgagaaatccttcttcatacttatatatattttttaaaaaggctaggagcaacaaatcctggattcttccataatttaagtgcaacccccattttttaaatcatgaaatagagtttaaattggcaggagggggagctgcccaacaaagttgtacctagagagaacctttcctgtaagtcccttttgaacaaataagtggttctaatcaaattgtggatgtatgatgagattctcaaaacaaaggaagtctactcctctaggagacactagattgaatgaagcatttcatagcatttcatctatggaagaactaggccctctcctgaaaaatacttgctttggtccctaccataaagcagcaaggtagtaaaggagaaaatgctgtgacagtgttttcttttgattcagtccagtagctatggaaactatcttttaaatgccaattggtcctcttccctgcaactacataaaataaaaccatttcttaccctcacggatgccatggctggaagctccatttttcaacacgttcaactaatctaagccctctcccacttttgctcagtatttgcaagctgaagctatcatatttgattgatactatggatttaaattagaatacacatgaatgtacttctaactaaggctgcgaggagtaataatgcccaaaccacaagtaaacatttgttaaacctgcttgatgtgctccaagaaaaacaacgtttgcttctttctctttccctatatctcttcttctgaggtaaaaatgcatgtaattcccatcacttgtaacgtgtttttcttttcagtgcctgtgcatataccataggccacaagctgcaattcagggtcaagagtttccttctatttacaaatataaaaaattaagatttttcttttgtggctccctcaataggaaaatggtagacaagctaaaatataaactgatactagggtctgactgtttttctgcatggatttcaatcctatcccattcaaaacagaatcatctccagagatctatttctagatttattcattgtttaattttttgagatttgtcatttttatttccttcactatatttaaacttttctttcagtaaacaagtttgataaagatggatattctttgtgtacagcttcctacttcaatatcaccttagttcatcatctttattgtcaaattcccttgtaatctatctctttgtaagatcctccctaaaattttgagatttgcaaatgcaaaatacaacaaactgttatgttccaacatgcattaacttttctcactgatttttttcagtgtgacttttctctttaacctccaatctgtctcatacaatttattggtagtatagtatttatataaccctattttatgcacagttagcatgaatcttaaaaaattaagggctacaatacccaagacaattctaaaggacaacagaattaaaggacttaaccacaccttaagaaatgccataaagatatagaattaagacagtgtgtttgaagcaaaacatataaatatatatttaaaaaaacaggcccatgggagaaaaggaggagctagaaagagactcacagttaagactgtcacttgatatacaacaagagtgacaaggaaagtatgggaaaagtcttctcactatatgattatgggtcagttggacacccatatgaaggaaagtaactcttaatctttaattcataccacaaacaaaactcaattcctgagggactgcaaatataagagagaaaataacaaagcttctgtaaaaaataaaacaagaacataagaacatatcttgatgactttggaagaggcaaaggtttcttaacacatagcaagtactaagcataaaggactttattaattttaataaatctataaagggaaaatgtatttgcaatatctacacccagttaaagacttgaaaataccaagtgtctgtaggcaaatatgtggagaagacagaggtctctgccactgctggtgggagtgtaaactggtacaaacactttggggaactgatagaacacgtgtatacccaagagccaacaaaatactcaccaaaaatatgtacaaacctgttcatagcagcacattacacagaagacccagaccaggacatacccaattgtccatcaacgatcaactacatcaataaatcatgctatattcatttaatgaaatgctgccccgtaactagaatgaagtgtttacgactacttgcaatgatataggtaagtatcacgaatacaatattgaatgaaaaaacagcgagaaaaaaacaaaccataagtattgaattattctatttgtattgaattattctattcatacagaggtctaatatggggaaaaaccaatttatggtaacagaaatcaggatagtatttgtgcatgacaaacaaggcatggagtgaattcttggattctttttcttgacctgggtgctaattacataggtgttttcactttgtgaaaaaccagtatactaacacttgatttgtgtgctcttccgtatgtatgttacacctcaataaatttttttttaattaaaggcgcaatccctattttcaatgaacatacaattaaattttgaaaccagaaaacatagaggaaaaacaggagaatgttaacaggaaacaggccacaagtagtttcaatcagcacatattcagcaaattcctatgcttgtggccaatattttaggagtgattgaaacatttataagtattgaaaaaattccccctgctctccaggagtttataactcagagcaaaaaaggatttttttgatttgatcaggaaaaaaaaaaaaaaaaaaatggaggtggggagagtcatagcagacactaaacaattataatgctagggcagtcaactagcatatgttgcaacagctgtgctgtggggattgagaaagaatcatggttggggtctgaaattatcaagaaaggcctcatggaagagacgaatgtgaccgtggagtggaaacatgcatagcatctgaattcacagtgtgaggacccagcaataggaatgattccagggagggaggctgtaggggcaaaatgaatggtaactgagtagacggagctttcctggtgaggtaggtaaaggggagtcactgaggaagaaaacactgaaaaccaaactgtattctaatggaaaaaaaaaaaatcactgtctatcctcaaatggagcaatgacatgaaaaaaagcttgttaaaaatatgtatccctttaacaatactgcttgtctctggaaactttttcaaactgtaggtcacagcaaattagcaaggagtaaaatcgctataatgtatggtaacccattttccctaaaagtgaaatagaaaaaaagcagaaaacaccacagtgccctacacagatccttagcaagaatgtacgtattccagctgatgctgccgccaattgctggaatcagtgggtaagacatggtgtgggcaacgtaaggaatacatacaatggctgcctcatccagcttcattttgtgaaatagcattgtttcttgaaatttttgtttttgtgatttacatgtgtgtgtgtatatatttgcatttatatgcataccgcgttgaaaataaaatgtgtttctcactgcggcttccaatcaagaaagtctgaacaatattcttccagaagtggagttctgcagaattcatttgaacaaggagtctatgcccaaataacattaaatgaggagatgcagaataaatgaatgagcaaacaggtagtgttaaaagtctacattaagacatgtagaccctccccaggttgtgcttcagccttaggattatttactcctccttggattccctgtatcccagaagttactcaatccagcatccttttcaataacatgaaatgaggctggaatttaaccatttcctaaatccaattcttcctgcctgcctgatctatctagcacgttgtgaggccttgcaaatagaatcatttatatcacatgcactatttaaagtaatgttagtttgtatttttaaacactgttccatttataaacacctaatacacacagccctgcttaaaaagaatcaaataactggcaatttggggcagaactgtgagatgtcttcactttaaattatcttgatatttgtcatgtttcttcctgattttcaacacacaaatctagcttcagggtggctaatggctgttttatgatagtctcattaatgacgttgttataaaaactgtgagaagcattaaaaataaatttttacataaagtgattttattctatgttaatttcctacccctttaaaattttgcagcattcaattaaaatcacataagaatttccaaaccccttcaaattttacagcattaaattaaaatcccataagtagcctccatccatgtttccacccccaccactttaaattaaaagggaaactcactagaaacccaaggtcttacgctattaaaagcattccaatcagccacacaaagtatttattgtgggacaacatccatgaatagttaaagacccacttaaaaatatgaatatgttttctttatagaagcttatcctaggagcagagaaggccttcattcattctgaaacctggcaacccggaagtaggcagcatgaaatctctcaagtgtacactcacttcctgttttgcataggttagcctttctccatgctccatagttctgcaatttctcccttccacatcctattttctattgcggctacttcaagtcatgtgtgtctcatgttacttgttccagagttaccctaaagtattttcatatgtgactatactaggaaaagggaattggaaattgtaaagtcctatgaggggattagcagtctccctgccaatgaggtcatgtgttgactagtcacattactgatgaagtgttcaaagcaactaagaaatttatcccaaaaagctgcattgatattctggagaaactgtttgttattacttaggaaggaagttggctgcatgctaaaagggaaaactagaacttgtccatgtgcagttgctttcatatcagctggtcacacaactttcgttgatttcattacagcccctgggagaaggtggtggaatcataaagctaccttgactaagtgtggtgagtgatctgcactgcctctgtttgggactatttattcctaaatctacaccccacgccacagaagttgggcgtcttccacttcccgccctatgctattcagaaagggtttcttttcttctaccttatcctcaaacaaaaccacccagagttccatcacaaggccacctgctatttttagatggagatcctgggcatgtgccctgggctcgtctcccatgcccttcctctgcagtgtgcactaaacagggcagggaatataacatgtgagaggatttcagaggagggcctctggtccactgggaaaaaggcagcattggtgccaggaccctggtttctagtccaaattctgaggtcaactggccatgtgtccttgctcaacccatttgaactttcctaggtcttagtttcctagtttataaaatatagggacaagactggacaatgttgagctgcactgcagcttttaaattctcttcagtgtagagttggataattcatggttttacagggacatccttgactcagactgatccagcccagagcacatgtctaacccttgactgctccggttcgttccccaaccagatcaacagacccaaccctggtccttggaaaagtccatttcttccttccttcctgagttccaatttatcacatcttatcctgagaaaaatcatctgctcctcactactcagttttaaattggcagtatccctgaacatttcttggtatcttacttttaaatttgtttttcttgctcagcgtctgccagagagatgcctctaaattcatttaacctggaccgtgtcttcccctttagccattcccttcccccatcccactacctgaatcacccctacttatgccactgcccctgcccctcccacccaataggtctgcattctcatccagaactttgaatgagttaccttacacggtaaaaggaactttgcaggtgtaactaagttaaagatcttgagatggggaagttatcctggatttttttggcagggctcaatgcaattaacaaaggtccttgtgaaaggaactcgaaagagtcaaagcttcagaaagagatgtgaggatggatgtaggggtcaaagtgatacctctgccagaggccagaaaccaaggaatgtgaacaaccactagaaagtggggaaggttaaattctccctgagaacctccaaaatgaatggaaccctgccaacagcttgattttagcacttttgacccccagaactatgagataatacatttcttttgtctcaagccagtaagtttgtggcaaattattatagcagcaacaggaaaccaatacactttatctctgattgttctaggtacaaccaccttcaggctgacttgacgttagtcacccttcctccttcaaagtaactgttgattgaggacctcctatgtgccagctctgtgatgggttctgaacaaaagacaacacagattcaagctctatgtctacgaagctgacaatctgacaataaattctgacttgaaaccaataactacaaatataatgagatctacaaaggaagcacatacgcccaagggaacacaaggtggggcggtttgggaagggccctaacctagtctttggaggaaggaggttgaagctaagtcctgaaagatgaggtggcagtatcctggagaaaggactcaaggcagccagcaatgtgcttctgaagcaacgtaaagaaggcaggtgaagaaagaagacagaaaaggcagaacatgtaaagccaccaccaagggttttattattattattattattattattattattattattttactgcaacctaagaagagaggttttaaacagaggaatgacaggaaatctgaaaacatcaggatcctgagacatcagggaaggaatgccagagcacaaggagaaacaatgggtccaagcctttgaggttttgtttcaatgaacagatattccccaggaaggaatacctattaatccacagctatgtgatcaacctttatcaggaccttgacgtgagggtgaggcagccagggaacagcccaggtctaggcgagcggggcaggcagagcggatgatctgcttcaccaccgtacatttcctatgggttggagccctggacagctcagccctctgcctcaccctggacacccaccaccagcttagggcatgtaagacagcatgcaggtgtggttcctctgcctcatcctgggtacccaccaccagcttagggcacgtaagacagcatgcaggtgtggttcctgacaccatgtggagggccagccgagggcagggccacctgcttctgaggcaggctctgctctcctgaggttctcactgcctgctattttctcagtggaaacaggttctaaattgaaaacaggttctctcgcaatttttaaaaagcatttaaagaaaatacagccaggggcaatggctcatgcctgtaacccggacactttggggagccaaggagggaggatcacttgaggccaggagcttgagaccagcctggacaacacagggagcctacatctctacaaaaaattagttgtgcatgatggcacaaacctgtagtctcagctacttgggaggctgaggtagcaagatggcttgagcccaggaggttgaggctgcagtgagccttgatcatgtcacagcactccagcctgggtgacagggtgagaccctgtctcaaacaaacaaacaaacaaacaaacaaaaacaagaaaagaaaatatgctttcttcttaaaagagaaagaaaatatatgcccctccatatctcaaagtttggcatccatggattcatccaaccacacactgaaaacattctttaaaaataaaaaaaaaaacccagcataacagtaataagaaaacacaaagaaaaaatacagtgtaacaactgtttacacagcatttacattgttttaggtattataagtaatccagagataacttaaagtgtacaggaggatgtgtgtaggttatatgcaaatcctatgtggtttggtatcggggacttgagcatccatggattttggtactggtgaaaggtcctggaaccaatcccctgagcacagtgagggatgcctgtatctgctgctagccacatacagtggagtggaaaagaaaacagacaaattttttttttacccagaccctaaaactgccattgagctcccccaaagataggccaagccttgcatgaatttgccggactttatttggccacatggttttgacttcattgggcacaggagtgttaaggaggatgacaacactaaacacagcatttagcacatagcagatgccaaagtataaaaaaagcatataaaatcattcattattgactctacaaggcactctatcaaactgtaacctaaagcagagatttgctatgcaataatagttcttatttaatagatgtgaagatgagaaaagccctcattcactactatgaaatatatgcatctaacaaaattacacttgcatcccagtaattcatacaaataaaaagaaaaagaaaatataagtgaaatcagtgtatagactgtaaagaaacatgaactcaacatttatcttaaaaagcatattccttttaacagcaatgaagaccagacacaatccaaatgcatatttctgccccaagagtaatcaactgcattttgtttattggagtggttctttgaaattgaggccagaggccctgaaactatgaggaagtctctcctaatgtttggccacagtcataacccactaaaattttaatttttattttaatttctttaggaaaaataatatttcacagacctttagtccaagaattggaactgcataaggtaagggaaagataggctcagtgagttaaaagtgtccttcctatactggaagcatcattattcagaggatgatgacattttcatccccacatctcctgattaaacaaacaagagaacagaagcttggttttcagatgggagaggtgcttattatcaatgaggagagagttcctggtagtaaggattacttagaagagctataaaatcactttgcccagaggcccttaaatggaaagaaatccatctgctcatgttcgtttggatgtaaccattcctagaagcagttgcagaaaagagatgacttgaacttccattttcactacggggctctctttctagtcacagccaagtagaaaacacaaaagcacaagctcccaacaacatcacaactcatagacatcctaccattggctggagctgggtcccctcagcagcacagggactgtcagatcagaccacgagaggtctttgcgtacagtaatgctgccgtgaagcagtcccttttaaactccaatggcatgtttcttctgccctgtcactgatttagacaaaagaaggtgccctaagatttttctatgcccctgggggtctgagcccccatgagaccagaggttttttaggccaaagtcaggctgcccatgggcaccaccaaagacaaatggagaaagctttcctcaatgccagccaaaaatagggtctacaagggttctaaagttatagtgcatgatgcccataaatttaaattcatgacttacttgcaactggcagaattcgttccaatgtccagaataatatgctgaagcagccatttacaaaagcaagccacaaccctttaccattgtccttcagcaggcagccagcctcagggggtctgcagatagcaacttgtggcacgtgaggtgaagactctgtcagtcccattcattcacttcgccagccttcttagagaataatgaatcctgtgtttcagggtaaagatgccaacctcaccaagactgcctcttgctaaagtgaataaccataacagagttcctgctgggcaatcaggcaagcaatccccaacttttccactcaacgatgcaaagtacaccaagaatgcccaatgcatttcaaaatgtaacccaggttcagctctgtggctcagaaagcagattccttaagaaattctgggagagagggaaagagaattaatgtgtctagaagactcactctgtgccaggcattctgccggacctttacataacttacttcatcaaacactgatgataagcttacaaagagcttaaggcaagtattgttcttccttatttcatggaagaggcagtatatcccacaaattaagtaaatgaaggctatagaagacagaagttaatcactgggtttcacaaaggcagaaagtggcagagctagataagatttatgccctctctaccacccaaggcttcctttcaatgcccccatgccttggactccctcaccccccgtttcatcatatttatcccttgaatggaaccaggatggggaagcaatattccagttgtagaaactctggggtagagcttgagttctgcctttttcaagctaggtgacattttaaagatcatttaaactcctagtctcagtttccttatatgtaaaatgaagatgcaggccaaggccaaatgtgtattttagtgagaaaaaaagggaaaatatatgtaaaagtgctttaaaattataaattcaaatgtgagaaagtgtcatcacaaaaccactgaaggacccatgccagacatgtcccaccagctcccctacaatgtggagctcagagtaagagataaggctggactccagcatgttctttaaagagcaaccaggatatctgccttccgtcaactccaggagtaacaaaaataagcagaaattcacttctctcactggcattgactcattcattgctccactgcaaaagcctgggaaacatgcctaaaaaattttagatgatgataactatagcagctgatctccaaagatggcccccaatgacccctgtctcccaatattcatgacctggtgtaatctcctcccacagcgaaaacaggttggtcctgtggcatgctgtgatctatagaacatgagagaagtgacacaatgccagctccaggactaagccttaggaaggtctagaagtttacacttttgccctgaaccaccatgtaagtagtcctgctagagagagcatgtggagagatgatatggagggaaaaagacacccagtcaccccagaggaacccagctttccatgtctgatgcttcagtaggaagcatcagacatgggagtgacccatctcagatacttcgacgaggctgagccctcaggtgactgaagtcccagacaatatcatgaggagcagaagaaccacccagctgagtctaatcaactctcagaattgtgagagatagtacagttgatattgttgtaaaccctaagtctggagattgttattcagcaacagataatatcaacaaggaggaaaaggtatcatcatctgatcctttactatgggtttcgtccttcacatacataatctaatttaatcttcactataataatttgagataggtattaggacaccaatttataggagtttgggtgaagttacgtaagttatcctaggtcaggatttgaaacccagctgtggtttgtaactgcaaagcccattctctcaatattcttgttatgtttttcataaagtatatcacagaattactggtctctaaagagttgaagaactgggatgaataaaaaagaagtgttactaaataaacatttattttaaataatataataaataatgtaaatggaagcaatgcagtacagtgaaaaaagagctttcagttaggagcctggaacttgaattcaacttctgacctaatcattagctgtgtgaaactgaacaagcaatttgactatgaaaaaaaagttttcttttataaaataataaaataacttcttagatttttgtggtggttgtcagaataaaatactggacataaaggacttctgcaaacaaaaataaaagaaagaaaaaaggaaaaatgtcctatagatacataaagaactgctgttgaattaacttgagagttctccacttcatagttaccacggaagtattcagttcccaaatatttgtattttcctgcctccttccaggataaatgttcttataaatactgttttgtttccagagctttgggacacatcactcttttaaaaatgcaaaataaaataaactgaaagataactatttaatacatcacttctttattaatatttttggaagcaaagccatgaaaagcagaaaccctgtggtttctactgaatagctacattttcccaccccattgatccactcacttatgttagtttccttggggggaggggtgtaagtgacagctttagggaatgtgtgtacaaatacagtcctgacacagacaaacagagggctcctagtgcgaatggatacgaaatgaggtctacaatagataatggctgttctgttcagtggaatgagatacaagatgtcccataaagacaaactctgccccttgggtgggcagtggcagctaagagtattaaaatagcccttgccaaccattgcttagaatccttgcagcagcttttatcctgttttggaaaccaaatggtatctctggtagtctcagcaatttatgtaacattctgtcatcggaagtaaaatctaggatcagaatgggtatacaaagcttacattacagaattaaaaacaagtgtttaattaatgaacaaattatgtgcaaactcataagtatgaactgacagggagtaaggaacatgctttcccttaaagatttaaaattttatttttccaaaggccccaagtctgtatatatatcttctattatgtaaataaacatcgtgcttcctatttcaaagtggaaggaatgatggttaattaaacccgaaaaaagcaatctgcttgatgaaataattggaaattttaagtaaaccaaagaaatataatctgatcaatttaattttgagtttttcacttagtttggggttaatggtactaatctaacactaatatgtacaataattgtatgcttatatttatgtgatatattctcacttgtttgacatattatcattgaacaaataggagccttaccccctctattgaactcgataatataaaaatagaaattacattgaggcatctagatgaaacccttcatctgaattaacaaccccattaggaaaaattgtgaccccaaaataaccactgtagagtgattatggctcatttggcatatgtttattccaatcttcctaaattgcttgtaattgttttattataaatgttaataatatataatgtttacatctgtatttttatcaaataacatttaggaaactttagaaaattatcctaagtccacatattaaaaagcaaggtcaatattctcacaagcatacacaatttgtagtttaaaaaaatagataaatgtaaaatatcttcagtgtattataaccacctaattagaaaatgaatgtgcccacatgaaccagtagagacatatcattacctcacattcattggttgtcactctacaattaatggaagaaatgtacagtcaatagtttaaaacaaagtgaaagttcctgtttcaatctagcacactagaggccatttattaacataaatgtgctcaggtaagtgccctttggggctgcagccctcatcctctgtgtcttctctcctagattcatatagtgacagaagaccatttaatcttggctagtcaaacagtgacaatagttagataatgaggctggacacatcataattttccctacttaccctctacagactgtaggacctacgcgcgcacacaatcactactcaaaagaaaagtgcgaattttgcaattataccatgactttatctaatgtagacagccaaaaaagaattcaggaatcaatacgaactttttcagcttgaagtagtcaacatgctcaaggacactgatatgtctatgtagcacaagttaatttaatattaagataccagtggtcagaaacctgtcaagcaagagcataaagaaacacagctgaaggttttcaaggccatgtgaagtgccaacaagcaatataactaggaacaaaatggatccagatactttatgaaattgcaaacaacaaaagagaaaaacattcagaaatattcacactaataactactagtctgaatcatttgtaagctcccaaatgcaggaacagaatcataacaggcgtaagaatggagagaagcaaatacagagaacaaatgagttattaattaagcagctaaatgcatttatattcataaatatataagaaaactaagacacttacgataactactctgataaacaattctagagaaaaagcagcacagcttttcatcatacagtattgctttattcctctgccttttttgtaaatattgagaacatttctcaaaaatagaaaataatcagggaaaaagaaaatcattattccgtgtaatctcacataaatagctgaaaggccagatgcttaactttgtgtacatagacaaaggagaacatgaagattgtgaacaaacctagaggccggttcttggagaccagagagacaaatgaagggacccaacattatgtgctaaaatctttgcatagaaatgaataaactcaaaagagctggcagcaacatctgtgtgacctttatactgtgcccactctcctttcagataaaggtcatgatgaggaaaaccagcagaagtgcacctgggccacgcaaagaaccagattcccaactgtagggtgtagagtctcttttccacattgtagatactccctcagcctacataagcccattccagtgcaggaagcgctaaagactgcacagagtcactaagggcactattacttacacttgacttttggcttgaattagctgggttgcgttttaagtgcattttattgagaaagcatttggactatacagtgcccaccaaaaacagacaaaaaccaaaaacaaaacagtgcatgcttgtaaagacatccctgtctcattgggtttggaatacccttggagcacctcactgtctttgactactgcatagaagtagtttagaaatctgaactacttgtgactaggcccctaatcactccttgctcctcactcaaatccaacctctgcatcattttcagattcatgttcctaaaaccacctacccaacatcacctctgactcaaaattgtcaatggcttccaacagcatttcctaagatagcctctacaaacagcccccacaatatgttcccttaagaataaattcagtggctgggcatggtggctcacacctgaaatcccagcactttgggaggctgagatgggcagattgcttgagcctagcagagtttgagaccaacctgtgcaacatggcaaaaccccgtctctacaaaaagatacaaaaattagccaggcatgatggtgcatgcctatagtcgcagctactagggaggctgaggtgggaggaatacttgagcccagggaggttgaggttgcagtgagccgagattgtgccactgcattttagcctaggcaacagagcaagatcctgtctcaattaaaaaaaaaaaagaagaagaagagaagaagaaaaccaaaagtaacagattcagtgatcaaaactattttaagaaattcttagagagaacttctgtaggagagaaacattttttaaactttctcccagcttttcttactttttcaaccatggggacttcttttgactaacagttctacaatatccaacagaactagccttccagaaagaggggtcttgggaaatgctggcccaaaaggtgaagttcaaattccttagcatgcatgtgatgacccatattaatgggtctctgctaccgctccacctccacctcccaccctctcttccaggtgctcaggtccctgcctgagctcaagccctctgcggggtagagtgctctccctcctcatgtctaagtcccactggggtcagctgatactctccttcccccagctggcctatcccaaccacaccagcctcatccatcactttatcttccaatctcccattccactgatttccttcttctaattcccagctccacattaagtgttttgggggaatcttacaggctttgtgtcctttttcttcacctaaattttaagttccttgaaggcatttgtattttataaataattttataactaacttataactaattacatattataactaattactatgaactcatgaaacctaagatcttgtacgtatgttaaataaatggtatgttttaatgaaaataagatgagtttctccaactatgtcagtgtagcaagaggaagagggagatcatgtcaaaacagaataaaaatctcagagtaatgtaatttagcagagtgactgagggatgtcctcaaagcaacatcaggattccaaagttctacaaaatcatcaccagtgccaaaatgttgaacaagaaaccacagatacaaagtcgtggtgtgcaccaagccctgaaattgactgtccagtgaaaaaagaggatatattccctaatctgatctaaagtagacacaacgattcataggaagagaagaaaaagagggacaggtcttttggggtctgttaagtgccaaatcagataatttgctaatttctaatacagtaaatccccaaatttccttcctttctacgtgtcttctattcaacacatatttattaaacacttactaggtatcaggcactgagaaaaaaaggcagctggaaatgtcttggggaaaattgggataaagtatgaggtacagagacacaaaggtttcttccttctgaaagccctagtaaaatgagaaagcaattttttaaagtatattaatgcaatgaggatgaggcagcctaaaataagtaagtctcatctaaaagctgtcaaaagccataagtgggcagatgcatgtgatgtcaactttatgtgtttctttcatttctttcaagaaccagtgactttctgttgccaaatgttcaatattagaataaagaacaccagtggtaatcactcttttaagtccaactcattgcctgacacatggtaggcacctaataaccatctgttgagtaaactaataaatgaacagatgagtgaaaaaaggcaggaaaggaggccttccacctatgcacagaaatgcagtgtttagttggaacttatttggtgctgtaattcctttacactggaacacagtgaagggtgggttatacagatcaatcaatgccttcttgagttaattcacaactcccttaaaaacattcttattaaagatcaaaattcataggtgaaacaaaatatttagatagccctacatgattcttctcccatgtcacagtaatgcaggcaaatttaggactcctacaataaaagtaccatgccagaattttgaataaatagtccattttatacaatcacaataggaaaaaacagtggagcgagtgacagctgaatttggacgcctgtccctcggacggaggtaaaaagaactgcactacgatattagtattttaacaagtttatgttttaaaaaagtgactaagaggaaaaacaaaagtagaacagtctgggagaaggcaagctgatacaaatttgcatcaggtgaactgtgtgttatatattgaatctgactgtaatgccagtaggttgaattaattcatcttatcttacttacaatgccatgcttaacatttggcacatgtgggcatatgtgtgaaacttgatacaaattaaattagaaaaaaatgttggtagtttacatctcattaatagaaaaaataaaccagaaaaattactgatgataatgtggtctttagactaggaagaaccttacaaggaaggtgaggaggatcttttcccaggaggtatttgcaatgaaaatgagcaaagaactgagaaatggaaaagaataaattctttgctgtgtgattaaaaaagcccaatcttttctctcgcatttctataatgctgtgaacggagtgtaggggatcaagagattgttgaacccaaatacaaccctgtatattgtagttattacagaaatcaccttcaagttttccaaacgattcaaagtaccagcaaaaaccacccaaggtaggcttatctcataggataactctctcctttgcaacccacagtgttttatttaataacaccgctataacacttaagtttaccttattatataataattctaacataacagagaaaatatctatttcacagatatcaatactgctgtctttgaaaaggtccaaagatatagtatgtttctgacacagaccaggtcttaataagtgacagatgtatttattatgatgatgttccttactatgatgctattattatttcttatcatacaaacccctcttccagctgagaataagactgtgttcttcatctttgcatcccttgcagcccaagcacagtgactttttacaagcatttgatgaatttaatgttaactgaaatgtcgaagcttatctttaaactaaactggtttatctcatgaactgacctgtttgtatctcaaggaaagaataggtatcatcttccatcatacttgcggagggccacactccctctaaaagtagctgcagcaatatttaataacccagagacttaggttagctctgaactaaaatgctataatatttagaaatgaaaataatacccaggaatgccaatgtaatgccaatgccaatgtaattgcttcaggttataacttccctattaatgattgttctctgtagggtgcagggaggaggttgagagacgaggttaatgtgaaatagccagtctcatccagtccaaagtgatatgaaaattatattaaaagaccatagctgctaacatctgttggctttcttgtgtgtgggccactgtctcatgccctaatatgtgttagattttattcttaacatcttataaatgcacataatttttttttatttttatagatgatgaaacaggttagagagattcataaactggccccaaatcacatcaataataaataagggaatcaggctttgagttcagacctacatgttcccaagtttgaaggagtaatcccacataacatgtgttcttagcaacattctgagttcccaaatctccggctatttagaggccatagttttacctatagcagcaagtgctatgacttatgttcaagacctttcaacacaacacaaaatgattagcttctctcccgttctctaagcccttcccacctgctacagtacctggaaatctaggtaccgacatgcttcttaaagcactttgtaggctatgttcatgtctgagatgagtaacaagttcacagagcctgttcatttatgccacctactctctgagagaaaggaccatgtgaaaacagtgtttattaggagaaagaggatggaagggcgtaatatccaggaagcaatccccgtcggggcaacagccttcaggagcaatactgcacctctaccctgcagcaagaaagtctcaaccacccacattcttattcatctacagaaacccaacaggacaaaactattaaacgttttaaaggaacaaggtatcagctaagtatgaaatggcacagttccacataaaaagcaggaaggcttgttctccaaaaatgccccttggtaaatatttactgggtgatggcacaaataatagggccgctgattagggggttacaaagaagactgacacccctgagcccggatgatgttagccatcagcacagtgctcttaactttccctgctcaagtctctcatgttttatagaaaaatttgaggagtatgcctaaggttggaatcagcctcacctctctctcaacttcatttgaaaacctgaagctactaaagtcccttgccagaagagggctcacccgccccactatgcccaatctaacttcccaaatagatctacattgtttgcattatgtgcttttcattgacatataatcaacctagagatttaggttagctctaaactaaaatgctgtaatatttaggaatgaaaataataaccaggaatgccaaatacagagtcacaggcttgagtaaacaaactctctaggaaaaaaaaaaaaaaaactctacatgtctaaaacttgccaccaaccttcatggttattaaacaataaaaagctcccttgggcatcttgaaccttcctcataacagaccttgccctaggattacttcttggcttatctgttatctagtcatacccaaagccagcccccagccataataatctccctatggtataccaccctgcttgtaaaacttctttgaacaaaagttttcaaaatgatacacaagatcagcatgatatctgaaatgcaaaccaaaatttatgactatcagctagcattataaaaaccatttctggaggaaagtcatgaatgatattcacaactaccaagtcagaagggctgccctccatgttcaaggagtggagaaaaggaatctacacaaaggccttctgtacatcctccctaaaaattattttaaaaaagagaaactgccatttatccatgtgagatatgactggttttcaaagtaatgggtaaaaatgaccaaaaccttgattgtcttcattatggctcacataaggcacacaaactcttttttttatattctaagtacagaaaattgcttcatttctcaagtaaatatatgctagaaacttgcggatatctcaagaatgctttgtagctaaagaaagtaacatcattgcctactcattttgcttaatttgctagtctcccagcaactttgtgctaacactttcatcccattttagatcctaggataaggcaatagtccagagccctggaaagcctccacctccagcagttcaccaggccactgaagccccaggatggagtttctctccaagacacccttctggtaatatacatgttacgtgcatttcacttatcttctccaagttacattccagtaactaagcttcagaagcttcttatgaattgtttattctgtgttttaaagctccatcagctgttaggatgatttgcaatatttttctttttggttaagcaggattggtgagcattactgggccttttggtggaatccttgctatttaaaattcctgctgctgggattaatggagataatgtctttgaaagccttttgtaaactgtaaagtcctagtcaaatgtagtgtgctgttatcacattaaccatcatagcaataaccataaaccagctgtaatgggggctttaaaatgctgaaacccatttgggtcttgtctttgctccattcccacccccgggggcctacaatggtgcccaacatatgggagcctctgaaggaagttttgtttggaggaacaaatcagtgactcagaaacatcacatggttttccaaagtaatgtccataggcaaaaagaagctaagtacgacaatttaaataatgaaaatactctgccaaaaatattggggtcctggaaagaaatgctacagaacaaagttcttctaaagagaattgatttgataatgaaatctggtcctttacagtcagactgggaaggagaaggagtagagacaggtgcagaaatttattagtccagaaaatgttagtccaggatggctcagagaaggaggctgccatcccagaaaagggaagggaggctgcagtttgagagggagtatcaaacagaaaacaaaaaacaaacaaaacccccacaaaataggcaaaagctactcctgcaaagaacattataaatgcaggctttttatctagactgtgtctttaaagtggtggaaatgaccaattctgtgtcttaggagggaggtggcatgaagccgggaaatgactgaggaagggatactgatatgaaatgatttatttctggaaaatgctcttgtaagcgtttgcaggaatagttctggttactagaggggtagtctattttaggtacctatgtataaggaggagtgaacgagtgaacaagttagtggggatgaaaataaaaagggaagtggtagcgtccagcaacacgggcctcattcataaaactcagaagcctcaaggataagaagagaaattccggggtggctgcctgttactcagcaagaaagcgaacactggcttgctggctcagcacttaacctgagatgaggatgtcctaacagccctttttctctaaggggtagtgtagggtggggtggggccaaaaggagaggaggaggaaggcctgccacccgggaggtccctaggactcagcagcagagagggccttgcaccagcgctccgctctgttccagaaaatatcctatttctgaccatcaatcagcattaagccagtttgggggctgagctttaggcacaggcagttgccagtagcaacagggcacacgctcctggtgagctgggcgggaggtggcaacaagggaggggccgcctgggcaagtggcctgcagctgggcagacaaggtcagggatctcccctacacgcgcaagggaggcagtgcggagggtgggggaggggggatcgtggcattaggtggggacaggcgcgccctgctggggccgggccagggagtggcccaggcctctgacctcgctggggagcagggagggagttttcccagtggcacagctatgcccctgccaaacccaatggcctcccggcccgggaaaggcgccactccagtggcccctagacactggagtcaaggccaagcgacaggagaggcgctggccctctgcttgggaggaccacagaactcaagatctgcccctcccctgcagcccctttacgcccccaccctttaggagtctctggaagatgccaacgtggaagtgtttctgcacgtgtgtgtgttttcatttgtgcttcccacacaaaagcgaggccccacaggtggagaggagggcgtgtgtgcgcgcctgtagagcggggctcgggctgcgtgggagctgggcggggatgcgcacacacggaccgactcccacagactgtcccccttcaggtgtcctggtgcaggctttcagggaagggagagcccctaacctcgccccacctcccaaaacttctccccctgccgtcgggctatggtaaaggggaaaggacaggactcaggaccttgagggaggcattgagtcagagggcagagaggggtcaaggagacccaggcgggaggcgcggaagcatacagtctgcggggacaaggactgaacggggtagtgggagccaggtgccgaagggctggggctagggtggcggcgcgcagggggcgcgcctgggcggggagtgggctggcgtctccttacctggccttcggtggagcatgctgctgcgggctgggggcggggtgggcgctgcgtccccaggggttgactccgcagcgccttcacttcgggggcagcaaggcgcgcgctgcagagccgggagttgccaaacttgccatgtccagagcgcggaggcagcctgggccacgcgctcaccgcagcccgggcacctcgcgctcctccgctttgttgtgttccgccgccagtccccctgcgcctgcctgccagtgtccccgagccctctcctgccgcgggacgtttcactggcgctcagggaggcccctcgggtgggcagtgccactttcctcctggaggcgcgcgttaaagatctgcctgggagcgcccggcgggcggctcggcttgcgctctgatgaggaggctggggcccatcgattcccaccccctacccactccccctcccctcccctccgccgggcccccccatcagaagctgcttaggatcggcgctgtcaaatccagcccatctgctgcaatcataatcagtctcaaccgaacggttctgacaaatctccgcctggagctggagttggagaagctggagagtgaggggcggggaagggaggtgggggtgaggggacgatggggaccgggcgccctgagagggggcctggagccttctattgtctgcccctaacggaggaactgaaaagggaagcagggatccagaaggggaaatagtgctttcatttcctagtaagaaaaaaaaaatctattcccgcaggtccctggttcccttcacgcccccacccccagcctcagctctgtctgggtggaacgaatgtctgctaatgaactaaacaaacaggtctcttaatcttatcatggagctgacccagagactggcacagatatccaaagtatcataattggcaggtaagagctggaactaacagccatttgtctggagtcagaagttggttcccaagtgcagttgggaataaagctcttgggggggagaacggccgtgtagtgtagtgtaattggccaggaagcttggcccttggcctcctgttggcatttccagagataaaaggaaatctgctttgggcaagaaaacgctgaattccccttagcctcattttgaatttaaaagattcgcatatttttttttctttttctcatgaaaatactatttttcaagaaatgctattttattagaaaataatgacttcaaaaattgaaaattttccaagcagaaattgctccacctgtagatgaaatgagatgctcctttcaataatatactttgaactattccaaaaattccactttaatacaatcacatatatttgtactggtgatagattcacaaggattatctcaaaaaaatgttttcaagtataatataaatggcagtagtcctagagacatacaaacaagtcttaaagcatggaagaacacaaccaatgggattatgtctagttttatacattcttctcaagtgctgggaaatgtccaattaccttgaatgacagtatttgtttgggaaataatttgttggataaacaaatcaccagtggaaaagttgaagaaaattttaagccctttattcagataggtataagagctaagcaaaaataaatataatttactgtgaaaactgaataaaattctaaattagggctcaaatcattcttttgctttatgctatacttgagaaatgtgtgcaagccacattaagcactcacttatctaggcagagactgtgttttccacttattttatagcccagtggtgcttacaacagcactaggcaactatggacactctatgaatactgatggtttgaaattttgatttacaggtcagaattaaaactacatacatcatggtgactttatagctgaggcaaagtggagctcaagtgttactttcccagtaagcaaatcatgtaagtcaaggacaactactggttagattttacagcctttttttttttttttttttttgagacggagtctcgctctgtcacccaggctgcagtgcactggcgcgatctcagctcactgcaagctccgcctcccgggttcacgccattctcctgcctcagcctcctgagtagctgggactacaggcgcccgccaccgcgcccggctaattttttgtatttttagtagagacggggtttcaccgtggtctcgatctcctgacctcgtgatccgcccgccgcggcctccaaaagtgctgggattacaggcgtgagccaccgcacccggccgattttacagaatttttatgaatatttaagtttagagtttttcattgataatttgtttaatgtgtttattactattcaataaaaattttgctaaaattaacatggtgccaagaaatgagtatttcaaaaagggtcctctcttacagaatgaagtatcatgctggtgactaatttaactaacattgtccaggaaattgctgttgtccaggaagagaagagttgagccgagtgtcaactactaggcttctggcaccatcctgcacaagaaattggtaagttctactgtgttatttcctagcttggtggtctcagttgcatcacagctaacttatagcctaaattgacaggcccacctccaatttattaattccttggtcttaacttcaaaatatatcatctcatgtttactcaattatttattgaacaatcactatgtgtcagtgttggaatatatgaaggaaaaatcaaacaaaaattttttaccttgtggagcttacattctggaggagaagacaagttagaaaagagtacataagtaaattataatgtctattagaaggtaatcagtgcaatagagaaaaataaagcagagtgggctgggtggtgcacaagtttaaatacaagagttctcagtaaaaatctcactgagaatgctaagcctgaatgaatgattaaaggaggtgagggagcaggcaagccatgcaaatatctgggaagatggtcccaggaagtgggaaaagcaggtgtaagtggcccttaaatatgattgcacctggcaaggtctaggaacattaatgaaaccttgagaacaggacacagtgaagggagaggtcaatgagggtaggcttagaagacagatcactgggtggggccaattaaaggacttggaattttactccaaatgacagcggaggacacaagacacagagggagtgacatgatcatctgacttttgtttaatagatcactctggctcccatgttgagaattaattataggagcagagaagggagcagggagatctgttattaggctattgcaagaatctaggtaagagatgatggcttggactgggtgatagcaagaaagataatgagaattggtggtgattttgaattgctttgaatgtagagccaacaatgagtggctcgaaagaaaagagggagtaaagagtaactccaagcatttggccctagcaaccggaaggatgaagttgctattaattgaaatgagaaagactatgggtggagcaaattttggtggaagaatcagcttatatgggttaagactggaatgcctattaagttaaattttaaaaataacttacgtaaagctcttagaatagttcctgacttttcgtaagtgccatacaaatgtttatggtggtgattattattgttattaatgtttgccaaccaaaatgagatgttgaatagacaattgtaccatgattgtggtggtagttgcaaaactatattttgttataatccaattgtacactcaaaaattggtgaattttattgtacgtaaactaaaccttaaaaaaattattaaaaaacaaagaacttactctcatgttttaaaagggagaatatggaactttcccatctgagaagaagcagcttcggaagtatcaccattttgtatacccattgaaataactgatgtaaataaagatcaccaatagatgctaaagccattaagtaaaggtttgatggaaaatagtgaggtaggtgaatagggtctggaggcagagaacctaaggccgattcacgctgacttcctaaagctaaatcaaaaggaaaaccccaactttccacacttaagcaacaaaagtactggaggctgctccctttacaaaccaccctctcctttctgcgtggcagatggaaaattgaaagtatctttgattggttgctttccacaaccaatcagatgcttgcatagggtgtaacctttgtaacttcacttcagcctgattggttgcttccctccgactgattgccggccactccttcatttacatagggtgtacaccaagtaaccaatgggaaaactctaattctgtactggggctcttggatcctattcttggacccgctcccaccctgcggagtgtacttttgttttttgttgcttcaaattttttttttttttttttcttttttgagagggagtctcactctgtcgcccaggctggagtgcagtggcatgatctcagctgagtgcaagctctgcctcccgggttcacgtcattctcctgcctcagcctcccgagtagctgggactacagtggcccgccaccaggcccggctaattttttttttttttttttcctatttttagtagagacagggtttcatcgtgttagccaggatggtcttgatctcctgacctcatgatccaccagcctcggcctcccaaaatgctaggattacaggtgtgagccactgcacccggccttgttgcttcattctttccttgctttgtgtgttttatcaagttatttgcttaagaagccaagaacctggacaccctccaacagtaacaatagaatattccaactacaaatactgcctcctgactttttgttaactgcgaaggggaaaagctgtattagacaagggagaaatcacctgacatgtttctccttatgtgatgctgtatgaaaagttttttgcaatatatttttgcaaaaaaacatgtttaatctgagtctgagcaaggcctttgctataattcccaccttacaggaaataaagatgatagaggaacagataaatgacatcacaaggaaaccattaggcatagcggaatatggaacttgctagaggtcttcaaaaagtcagtgttcatagagaattaaaaaagtagaggcactatcatagattgaaagagacgtgacaaatgcaactaatgggactgggcatcagtgcaaaataagcagctataaaagacatttgggacacgattagagaaattcaaataagactggtattagctgatataatagaattttcattaatttttctgggggtaaaagtgatactgtggttataaagaaagtagtccttatttttaaaagacacatactaaaatatctggggttgaagtatcatggtatctaacacacattttggaaaaaatatctgtgaagtaaaaatattaacatttgttgatgctaagttgtgtgcagataaatattttattattctggtcttttaatttttctatatatttgaaatttttcttaataaaaattgagcaaaatatacttataaaaatccatgctcaaaaagtaattataggaaaattagaaaaatttagaacttgatgtctcaaaaatatccaaattataagatggaaagaaaggagtatgtagaaggagattaataattttagtggacatgtagaaatgaagaaaaatggaaataaatgttcaaagtacccaaacaaaacagaacaaaaaaaaatagaataaaagaaatgaaatcaaagtctaataaaagagaacacaaatcaatacaggatcaataaaacaaagtctggttatatgaatgaaaaacagtggagacataaatcaataagcttagggataataaagactatataactaaggataaaatagattttaaaaataggactactttactatgagcaattttatctgttttcaaacttattgacataaagtgatcaatgtcctaaaataaacttttaataaaattcaataatccacggaatcttgaacaatcaaatagattgaatcagtagttgaaaaaaaatttgctgctgcataaacataggtccaaaattttaaacttattccttgagataaaatttacccaagttgaatttgtttttagcatatgcaccgttatgcaaccatcaccatccccttagaacaatttatttacccccaaaaagtacctattaacattcactcctcattctccagccagaggcaaccaacaatctgctttctatccctgtagaattgcctcttctagacacttagtataaatggaatcatacaatgtttagccctttctctggcttctttcccttagcataatgttttcaagttttgtccatgttgtagcacgtattggtgcttcattccttatttccaaataatattccactgtcttcatgcaccacattttatttatccattcatcagttaatgggcatttgggttgtttctgttctttagctattataaataatgcttttgtaaacattcatgtacaagtttttgtgtgggcatatgtattcatttcttctaggtatatacctaagctgtggaattgctgagtcctatagtaagtgtttaacattttgaggaactgccaagctagtttccaaagcagctgcaccattttacattcccaccagcaatgtctcagcgttctaatgtctccacagcctctccaacacttttatcctttgtttatagtcatgctagaggatataaagtgatgtctcatgaattttattcgcattttcctgatggctaatgacgttcagtatcttttcatgtgcttattggtcatttgtatgtgtcttctttggagaaatttcttttcaactcctttgtccattttcacattgggttatttgtcttttgattgttgagtcaggggctcattacccaatcttcacaaaacttgaaaaaatacagaaactctaataacccatatctcacagagagttacagggaattttttagaagggggaggaggagaaaaaaggaagaataggaggaggaaaggggaaaactaggggaagggaagaggaagaaatatttttatcaggttagaaggactctgataccaaaagtaaatataggctgtatgggaaaggaaaattaaggaggctctcaaaaattcttaagaaaacttaatccatcagtgtggaaaattataacagtagtaataataatggttataattaaatggtgttactaaataagatttatcctgcaatgtaaagatgatttggccctagaaaaatctattaatttccaaaaaaaaatttgggggaagataaaaaaaattaaaaagataatcatttcagtagatgctggaaaattttaataacattcaacacttattcagggtttaaaaaaaaataaattaaaaaacatttcacctccccaggaataaaagggaatgcccttaacctgataaagtttgtctaccaaaaaaaaaaaaaaaaatctataacacgccttatattaaatagttaagttaaagaacatttcctttaaatttttcctctagacaaggatccttccatcaccacttcattttctctaaggtcttagagcagttattatttatcaccaatattatcagcatctccacagaaaatggaagagaacccagaggcaaatcagatatagtaagagagcagtttgtttactagataaaagaacaatataccaaaatggatagtgttcttaagatatgtaccaaattattagaagtgtatactttttaggagatcccacttaaaaatagtaagaacaaaaaaaaatttagaagatacgaataaacttaaagatgtgaaacacctttatagagaacactttgttgaagggcttaaaagaatggagtaaatagtaaaacatataaaagtgatggattggaagactcaatcttctggcttaatctttaaatgtgaaacattatcaaccaaaatctcagcagatttatacactcaacttaccagcgagtcctaaatttatttcaaaaaaggaaaaggcccaaattagccaaatatatttagtaaatgtgaaacctctaacattccaaaaagggtcaggtaccttactataaaacaatgtaattcaacaggtaagagatgtgggttaattggaatagaaagagaccctagaaacagactcacatttatggactcagggtatatgaaagaaatggcattattaattattggggaaggattactgtcaaaaaatggcaccaggttaactttctatgtgataatggaaaaaaaaaaattagaatcctacctcaggccatttgcaaaacctaaactcagattaaaaactaaacataaaaagcaaatttataagactttttgaagaatgctttggaggatactttcatatcaggcggggaagtataatgaagcactttactgtattaaaattttaaaactttgtaaaaaaaaaaccataaacaaaatgaaaagtcaaggcatagactagaagaaccatgaaaaatatgtattataaacagaatacatatcctaaatttgtaaagaaccacaaatcagtgggaaaaagtgaaaaaaaaagtggggggaagcatagaaataggcagttcatagaagatagttaagtggcaataactatattaaaactgcttaatatcagtactggggaaatgcaaattaaaacaacaatgaggtagcatttcatgcctatcataattccaaaatataattcttattacactatgtgttggtgaggatgtgtagaaagacctcttccacattgcaggtgggaataatttggatatatttattaagttgaaggtgttcgtactctgtgacataggaaccccatatctatgtactcacggaaaaggctcacacatacacacatacacacaaccacacatggaactcgcacgaaatccattatattaaatctcaaacttcagtatgttctggaaagtataaccattataaataccacctgttgataacaatgcaataaaacaaattatttaaaaataaaaatagaaaactaacatttaagcaactcttcaatgaaagagattacaaaccaaaatttctaaatttctgaaaaatgacagtgaaaactaccggatgcatttacagcagtggttacagaaaaattggcagtcctatgcacgtgtatcaatgaaaattaaaaaatataaataaaatttcagctcaaaggcacaaaaggaaaaataaccaaaagaaaggaattaagggtaacagtaaaatgtagtaacaaattaacaaatcagaatctagttgcctttcttttttaaatagatcactacataacttaatcatgaaaaaaatgagggaggtgaataaatcaccaataaacagttgacccttaaacaacacagtatgagctgtgcagatctacttatacacagatttttttttcaataaaagttatacagagtatgcctgtctcccgttctacctcctccacccattccacttctatcacccctgagagagcaagaccaactcttcctctttttgctcctcctcctcagcccatttactgtgaagacgaagaggatgaaggtctttatgatgatccacgtccatttcatgaataggaaacattttctcttccttatgattttcttaatagtacttccttttctctagcttactttcttgtaagactgcagtatataacacacataacatacaaaatatgtgttaatagaatctttatgttatcagtaaggcttccagtcaacaataccatattaatagttaagtttttgtgggagtcaaatgttattcagggaattttgactcttcaggggtcagcacccctaactcctatgttgttcaagggccaattatacaagataggaaatgacaaatgggaactaactacagaaacaaaaattaagaggcaactttatagacgtcatatacatggaaaaaacttgaaaacatggacaaaattgaaactttctttggaaaatacatttaccaaaattggctctgttagagatagaaagattaatcaactcttctagaaaaaaaaaaataccaccccacaaaaacatctctaggcccaaaacaaactcccaaaggcagaccactccaatgctccacatttacttcaggacatggaaaatgaagaaaaactttctaattatttttataaagcaaatatagcattgataatttaacctgcaaaagtcagttttaaaaaaatgaaatgacagggtgatgtcactatatatatcactgcaaaaatagtgaataaatatgaccaaaacaatgtaacactacattaaaaaaatatcacggccaagtgacatttaatccaggaatgcaagtttggctcaatattaattgatcctttagtatatgacaccctgttaataaatctaaaggaaaaaaattacaagattctctacacaagtgtttaaataatctttgagaaaactgaaaatttaacactcttcctgatgaaaataggaattgatgtatattttcttaacatcataaaacatatcatgcacacatatgcttagtcctaacatcagtatctcacttaagggggaactacttgagacactccatttgatcaggaacaaggccaggatgtccgctgcctccacttctattaaacattttattggattcaatgcaattatgcaagataaatcaaatggaggcataataattggaaaagagcaagtaaaaactgtatttgtagatgacatggtagtactcctggaaaatgaagaaaattatgataaaaaattaacttgataaaatttagattcagtaaaaattaatatatagaagtcagttgctttcacagacattgatagtaaactggtggaggatatactgatagagaaaacctcatttacattagcaacagagatgaataaatatgtagggaaaattagaagtcgaaatgtataaaacctatctggggaaacgttaaaactcctgtaaatcacaaaaatagatgtgaagtaatagagacattggctgttctataacagaatgactcaagattataaagctgtccgttctaagttactttataaaattaacacgataccaataaaaataacaaggttctttgggagctagactagttaatacttaagtttatgtgaagaaacttccaagaaaaggcaggaaaacactaagaaagaaaatccaggaagagaaaataaagtatacagtaaatttactataaagtttctaaaatgaaaacagtgtggtgcaggtgcgtgtctagacaaccagggagaaacaggtttgaaaatccagaaatagatccaattatctatggacattcaacatacaataaaggtggcatttcaaatcacaaagaagggactttttaaacaaacagtgctgggacaattcgttggccatttgaccaaacataacattaaatgtatacctcccaaaccatacacaagaataaataaatagatccaggatctaaatgtaaataatgaaaccacgccatcacaaggaataaaaaaccacaggtgaattcctttatcagctggatgaaaggaatggttacctgacaatgactcaaactccagatgccatacaggattagtaaatttgactatgtaaaatttttaaaatagtatggtatatcagctttctatggctgctgtaacaaattatcgcaaatgtagtgacctaaaacaatacaaagttatcatcctacagttctgtagattagaagccccacaggcctcactgatgtaaactgaagatgtcaagaggactgcatttttttctagaggctctaagaaagaactcatttctttgcctttcccagcatctagaggctgcctacattccttggtccatggccccttcctccatcttcaaaagccaggaactttatgtctcttacccttttctgtagtcacgtctccctctgcccacaaccaggaatggctgttagttttcaaggacctgtgattacactggacccacctgattaatccaggataatgtcttcaactcagagctcttaccatctgcaagtcctttttgccatgtaaagtaacatttttaaaaattctaagcattctgatatgtatttttttgtgggtaattatttttcctaccacacatagcaagaaaaaactcaaaaacaaaccaaaaaatatttttaaaataaattgaaagacgtctgacaaaatgggagaaaacatttgtagtgatcacaaataagaggctaatatccatccctaaactacaaaaaaaaaaaaaaaaaccctcttaaaataagggggaaaggccaaaaacttaatagaaaagttggctatagtcatgggcaaacaattcacaaaacgacacgcaagtggcctttaaacataggaagaggtagtcaagctcactcttaactagagaaataaagttttaaactacgctgagatactatctctcattcatcagattgggagacatttagatgttgatcctttattctattggtgcgactgtgggtaatcatgcagtcttatacattgctggtagaaatataaattagttcaaccattttggaggaaaatttgacaataagcaaaactctattttcatttaccatttgagtacacattctcactttttggagttaaccctgaaagtgtacttccaataatacaaaagtgcataggcactttgtttattgccgcactatcactgcccactgttgcttaaaatgtcacttaactcatccttggtcactatatatccatttgtatccctattttatggcttatccgtcaggtttggattgtatactacaattcagatttgcagtccttcattgggcttctacaccactctctgcatagaactgagtaaatgtttgctgatttgaacatttttagggctaaacaatcattttgttttcaaaaattttattttggaaaaaagttctcctacataactaatatcacatagctttattaattttgaatttaacccagattgttgtccaatatacttttttttcacagttgttactaagtttctgttttatcacagccagtcttaagtaaggaaattagatttatttaataattaaacctctatgacaatggcccagggccaactgaattcagcacagcaacttagaataagattctactggactttctatacttttcagccacaactgagcacaccgttgttctatgatagcattattgtcattaatgaaatgtataaatggaatgcaactaaatagtgcctggttaaatagttcctggggcttggtaacaaaacaaataaatacacaaccatactctgaagatgaatgttcttgtcttaatttagttattcacacaaccatcattcattaggaaattaatacaatcaggttcatgtgtcaggttcttagaatgagaagtgtatgatccttaagccaaaaaaggttcattacttcaatttttaataatacatcttctagatattttattatctgtatccagatcctctttagactgtctcctgaaattactatgcatatatatacacatacacatatatagtacctgtatttattgttatatgcctatatgctacttttactggaatacttccctttatatttgaggacctctatttaagcaaagtaataacctaagtacaaacagggaaaaaattctccctcatgtacacacatgcatatttttaaagtttgtccaaatccatcacaattgaggcttagattagcatccacatgtctgaaatggctgcataagggggaagggtggtatatatttaaagaaaacttgcatttaagaaattcattattgaccccttaaccctagcatagggatagtttcttttgttttctgttcgtttgtttatttatttatttatttattttttgagacagggtctgactctcttgcccaggctggagtgcagtggtacgatctcggctcaccgcaacctccacctcccaggctcgagccatcctcccacctcagcctcctgagtagggaggtcccggggcttagcagagtggctccaggggatggcttagaaggacatgggcacaggaaatcaaatttgtgatgacttagatccttcttatttacttatttaggagttagtacatcaaggttgcaaaacatcccaagaaaacaatttttaaaattcattctagatcaggaattggcacccacaggccaaaccttgccagttctatgtaaatagcgctttattggaatagttatacctgttcacttacgtatcctttgtgggtgttcttgagctaagattacaaaattgagcaatttgtgacagtgacgatatgggtaccactcagaaaaccaaaaatatttactatgtggtccttaacagaaaaagtgtgctgaccctgctacagaaaatattgccctcttacaagatgtcataaacaggaatgcatactttcaaaaaactattaatgattataattttgagttatactgacacaactagagcaattaaatccatgttataaattctaaggagtcttcaagtttctgatataacttgttctacagcacatacattgctgctgaatatcagtgacattccgtttttaacagtaagaatagaagtgattttagctaattaacttttgaaattaactttttatagccagcaataactacagcaagattatttctagataattaaaatacagtgctcctaatgaatggatatctactataactttgtttataaagacaagtatagttgcttatatcatttcaaattgtgctttgtgtattcaaaattatatttttttcaaaatgtaaacttgggttttttcaatctatttatttttatgaactaggactacaacagttgccaaatttctaaaatatcttataaaatcttaaaattacaaagtcactatttggtaattaaaccgttaaaaatatcaagaagcctgggcctcagaatttcttatgaaaggaatagagttttgagaggtattctggagagatattggaaattaacataaaggaaataatgaaagctgaaattgatacctacggaattgaaaaatgttagcaccatcacaagttcttaaaagttaagaactatattctaggaacttaaagaatgtgttctgcctttctactatttttggcctgtgtaggcaggatattttggaaggataggctgggttgtaccatggtgacaagcaacccctagatctcagtggcttgaaacaaatgcctatttcttcttcatgctagcttttggtggggactctgctcatggtaatcattttatgaccccagctttagagaaaccaccatcttgagagctgctggttgccatgcaagaagaaagagcatgttgggcagttgcagacccacagttaaatgcttcaatttggagtgtcacttttgctaacaattcattggccagaacgtgtcccatgaccccatccatcctcagaggagcaggagttgcaattctatcacgtgcctataaggaagagggctggatatatttagtgacaactcattaaatgtttagggtaatgattaacgacccagccctccagccaaactagttaattaatgtttgtgcttcatttccctcatctgcaaaatgggaagactaaacctcataaaactgtgatgattaaatgacttaatacttgtgaagtgtttagaacaatactgtcatataatgataaagtattattatttctttttaacttttgtacctgccaccctggtcttcagtgccaaaagcagagatgagggcaaaaacaaaagtgggcagtcttaggaatgctgacctggacccagtagggatgcctacaacagatattcttgagaaaagacccatgaccaaatgaaagagatcaaagatgctaggatttccttataagtaacattgatccagaaggtatgaaacaagccattagcagagcaatgatttatttttaacgggaattggaagataagggggataaaaacacctaaactgaaaacaggacttttgtaatatgaaggccagaggatgaacttagggtgtggtcatataatgtataacatggatgcaatcagtggaagatgctgaatagggctatcatatagcatgcatatttgggtaatacggtatatgaatgaatctcttctaatctgtggtttagaaggcttacaccaggctaaacaggagttcaagtaaatgactcccactagaaagagctacggctacaaagaagagaaatgggagcaaagtgaaagtcaacccaacaattatgtagaaacatagcaagtggtagactaatgacatggttcattcctaccagaattcctgtttcctcagtactggcagcaatgagattgctctgaatccatgatcatccatatgtattaaaacaatccttgactgttggacaccaaggagatgccaagataaacagacatgatttctctcttccaggggcttattgtttaacaagaaagacatagggtattaacctaccttaacataaatcagaatgaagtaagttttatactactcacataagcagaacattatgggagtagagaaggagcagaggttcatttttaatatggaatttgggaatgcattttggtggagatggcattttaaatgagattttaaagaagaggaagggatgaaaatggatacaatgaataagataacataatatcatgagaagccaggaaaatgggtaagattgaccatttgaaggaggtagaggagaaatagtttttttttaaaaggaagcttttgttcctttgttccttttgtcctttgttcacccccagtaattcagcagcacacactagactgtctcattctataattgtatgtatttctatcattctatagattctatagatataattctaaaatcattctataattttatgtttatgactcccttttatttacctaaaacattaactataatttttaaatggctatttgatgttaattttatttctgtaatctttaaatgtaagcgctacagttcacatttttctagatggtcacaaaacaaattcaaaagataataaagctgaaaaggattttttttttttttttgagacagagtctcgctctgttgccaaggctggagtgcaatggcaggatctcggctcactgcaacctccacctcccaggttcaagcgattctcctgcctcagcctcccgagtagctggaattacaggcacctgccaccatgcccagctaatttttgtatttttagtagagatagggtttcaccatgttggccaggctggtctcaaactcctgacctcaggtgatccgcccgcctcggcctcccaaagtgctacgattacaggcgtgagccaccgtgcccggccttgaaaaggaattttaagttaaatttttgctttatagataaagaatccagtgatcaaatgatttcctcataattgtagagtggcagactcaagaacttgtagaactcatatcctaatactgaatgtatttgttactttaaaagataaaataatcaagaaaacaacaaaaatgagtccagggttactcttgtggttgctctgtgagtatcatttgtcagaagcaaggtgaatgatgcctataagattgtgcatatatatatatatgattgtatataatataaatagaataaacatagaattaattactaacccctaaaatgtctaattgaggagtcaccaattcaagcttgtctgtgtttaggacaaataaaaggaagccctaccccatagagtagggattaagttgatggaactctttacccaacaggaggtagaagaagttggaaataaaaacagattttaaatggcttatataaattaatgactggcccatcacacagttaataagaaaaaaatagtatgtgtgggtcatgttatgcatgtttgaagttgacatcaaagaagtccttgctttgccaactctgccaaagacagatggcacgtggccatgatgcaccgtggcaattcttgcttctgtttgtgaaactctccaaaggctgtgttttggaagtcatgagaaattgctaggttcctgggttgtgaatagaagatggacattcaaggaaccaatctctatctgtatattaaccaagacaactatatctaacattttattcccaaacaggagcataagggacatttccacattctaactttacatgaagactcaggactttgaaagcccatgagaaagttttcataaggatttatccacaatttcttctttgatttgctcagatgtgaagcaggaaaccttccagacatcctgaacctctgaactttttgtggattgcccatcaacacaggcaaacattcatgaagcaattcaaaaatctcttctcactgcattataagcatgtccttacgttattcatatatcaagagcatgcccattcccaacccacaatggaatgtgagcctaattacatgttcctttggaataagatctcaccagcccaggagtgtcagaaaccctctatcatatatacgtatcttgtttccaaaatgatcttcccaagccaccctaacaggcccccttcagaatgcttcctgctgacaagtgaatctgctttttgcctttcacccaatctcagctcatgctttctctgtgaaaatatcacagaccacatctgacagtggtccagctaattaatgtactccaatgtctagcaagcatttgacaggaaaaataatctatacagtatttattgcaaaatcttcaccaatgtgacaaagatgaatgtaaactttacataatcatttttcatttgttatccaaagttgaaagtgattttcaaatgctaactttaaaattatgatgaggaagataacagctctgctttaaaactgcttggcaatggaatttctatagtataatggtttagcaatgagctagaaaaataaactctcttgctaatgtagtaaatgggccagaaataaacttctcagggatttgggtggtggggtggggtgagggaggggcacacagaggggatagtggaattggatttctggaataaatgatctgaaacccttagcacactatatcttcaaaaagcaatgtcttcctttatataatgcacgtatcaccatcacgatacgagagcaactcgaagaatcttaacgtataccacggtaaacacctacggcacccaactcagtctacagcaggacacccaaaagttaaattcactttggctgtggctgtgctccaggtacatattttctcatgagctttgtttctttgttctagaaccatccttcccaatattccttaacattgaaattatacatgttaaattaattattgttcatttaactgatgagctgaaactcacgtccttccttttgaaagctaaagtaatcttctaataaaaggtcaggaattatcaaatttacttgtaattattactaattcttctgtgacttcttttttttttttttgaggtggagtcttgctctgtcgcccaggctggagtgcagtggcacgatctcggctcattgcaagctccaccttctgggttcacaccattctcctgcctcagtctcctcagcagctgggattacaggcgcccactaccatgccaggctaattttttttgtattttttagtagagacggggtttcactgttaaccaggatggtctcgatctcctaacctcgtgatccgcctgcctcggcctcccaaagtgctgggattacaggcgtgagacaccacgcccggcctcttctgtgacttcttaaccacaaataaagtcttggccttggaaaaaggaagatctgaaacagaacaaggcaattaaaaagtgggtggaggaagtataggagtagtggagaaaaaagaaaggaatggattttctaaatttaaaacactctttgccctttcctgaaataatgacttatattctttgagttcacaagagagtaattggatatgcatgatgcaatgctggaattttaggtattttgcctaaaggttattaacaattagtaccactaggggaaaaatcataaagttagttagaataacaaccctctctcaaaggataatgaaaactggacttgtaatctggtcataataaaaatatattatgtttatattggagcctcacatgtcaagaggaaaactcacaaactagaatatgtccaacaggtggccatgactaaatgaagactgaaaaacaagttgtatgaggaccaatgaaggaatcttcctttgaagcagtaaagactgcgaaaaaaaacatgaaaaactgtctttagataaatcctttaacaggaatggtacacagaacagggagatgttataagtggagctactgatgacagcattagagccaaagggtgaaaggcagatgttgagtcattcaatagaagaggtgtctgatctcttcctatccaatgtagcagaatccatcccatactatatctgaaagatgaccactttgctttgacatttgcagtggtacagaactcactatctcaagaataccttcctcgggatggtaataagtatgagaaatgccctttctagttctaaatttcttctccacaagacaactcattccattttcaaacaattattagatctatccatctcttagtcttctatttgtcaagcaaacatctccaattcctcacatcattattaattcagtattgtgaaccttgtaccattttagtcaccagctttgtggataatctttggattgtagtgtctgtaactgacatccaaattaagtgctcttgatatggtctaactagcaactgaccccatccatatttctatttccaaagcagagaaacaagaaaatcaattggccaatataactgaataaatccaggtaaatacatatttggctttcaattagtcaggaagtctgaatttctagaggatattgaagatacagcatcagacaatgcatttgtctgattgctgacaacttttaatttccctgttcaagaaaatcgatcaatgtgtgttagctaaacacctgttatgttcaaccctgtgttagtcatcatttgatgtgtaacagaagtgtaaggccaggtacctacaatatttgtagagtcaatactaaggtacatgaaataattttagagtttttacaagatatacatcattatgtatacttatatgaaatagtctcaagttcagcagggaagactgggcccaggtgggctgaggaatgcatgtgaagaggtagggaggcaggaaacttgaaggatggttagggcttgtctatttggaatggagagagaggccacaaaggagtgcgtgtgtagaaataatgagtaataaaggaggtcaaggttagtagggacgtgtgtggttacaaatagaaatatttggatttgtaccataacatttctattacaacttcctttctcccattccaaacatgcttggttttacagaaaaaacttccaggactcagatttccatgggtattagtttgcaaactaatccctgatgagatattatgaggagctaagagagtgatgctagaattctcaagtggcaatggcaaatttcagggctgacttcctggataaccaattctttttttttattctgagcatgggaatttcagttcatccagcagaagaaatgttttttgatagatgtgacttttggtacattttgaattatgtcatcttggggacaaatggtcccaaaagccaaggtcctaaatgtgtacatctgatccaactctaagaacttttgctcagttgtgacgtcaaagaatttctattttagagtggtcttctgcaactgataccatccatatttctgtctccaaagcagagaaacaagaaaatcaatttgccaatataactgaataaatccaggtaaatacatatttggctttcaattagccagggagtctgaatttctagagaatattgaagagacagcgtcagacaatgcaatttcctttaatagggaccataacctcagagttgctgctctgttttttaatattgtacaattaactttttttttttttgcagcacactctgcttatagcttctgtggaaacttaaacattattcaatagaataatttcctggaaaatcttttgaaagtggtcacagccctgaccttgctctggtgccctgggtccaccagcatgctgtttcattacctcaggaaggtttggtgccaagagacagtccaagagttagtgcataaagaaagctaggttcataaaagaattaatatctgccttctttcaaggagggaaactgccacttccaaccattttatgcatctatcacttctcttctatcttcatcattcaacccttcaactggcctacctagatgacaggtaaaaattatagatttttaactcttaagaaataactgccgaagtcatttcttccaaaccattctcattaccaatgggaaactcaggcccagaaagcctaaatgacttttgcaagaccacagagtaagtagcagagtcaggacttaaactccacattgcagaagatgaaccagggatgatatttttaaaacttagcaatggtatgacaaaatcaccaaacagttagaatagagcctctgattgtactggtgtgccattaaataccagccccaactggattacagtgtatatcagtaatactttaagggataaagagaaaaaatgtgccacttactatcaagctatttaaaggagctaggtaataaaataatcataatttatttttactgttggttcttccctttttcatctttttgccttttttttccattgtctttcttgttactaatcctgtgaaaattcaccctctgtttggcagcccgggtcattgttatttgtgctaagctcctatattattagtctgttatcatattgccataaaaaaactacttgaagccaggcgaggtggctcatgtctgtaatcctagcactttgggaggccgaggcaggcagatcacttgaggtcaggggtttgaaacccgactggccaacatggtggaaccctgtctctactaaaagtacaaaaattagctggaaattgcttgaacccaggaggtgaaggttgcagtgggccgagatcgtgccactacactccagcctgggcaacagaacaagagtccgtctccaaaaaaaataaaaacaaacaaacaaacaaacaaacaaaaaaaaacagcacaactacttgagactgggtgatttatacagaaaaaaacattttattgattcacagttccataggctgtataggaagcatgggtggggaggcctcaggaaacttgcaatcatggtggaagccaaagcaggcacatcttacatggccagaggaagaagcaagcaaaggtggaggtgctacacacttttcaaccaccagatctcatgagaactcacgcactatcacgagaacagcaagggggaaattcaccttcatgatccagtcacctcccactgggcccctcctccaattctggggattataattccacatgagatttgggcagggacacaaatccaaaccatataagctccattctgcattcaagtgtatgttggtcttgccaaaattatcaataccttctccgtaaataccactttcaagccttgtaggttaagccctgattatgtttgtaaaagtagcttgatctacatgtctacaattgttctctaatttgctttatccaaatggaaaaaaaaacacacaatattttaggccttgattttcatcatgaatttttaaaaatctaaaattgcctcttcattgtgttatttcaaaatcatgagatatcctttcattgcttctactgataaggttgtttgtaactcaaaatcataattggtagatcaacagaataaaattatgagatacaaatatacatttgattattattgctactggttagagccttcactatgacatgcagtgacatgctcacagaaatgacaagccctaaaacttcttgctttttggttaaacactttatgattaaacatttcaatctttaaactttctaatagtatcttgaaattgtgtatctcattttaacatttttaagccacttagacaaatgactttttgccatgcttgcttgactttttttcttgcatggacttacagataaaggtggtctcatccctaatgaacatatgaggccacaagaatttctcctttttttttttttttttttttgttgttgttgttgtttatttttgatacagggtcttgctctgtcacccaggctggagtacagtggcaggaacaaagctcactgcagcctcagagtcctggactcaaaccatactcccacctcagcctcctgagtagctgagacccaggagcactcaccacttccagctaattttttgtagagacaggatcttaaactcctgggttcaagcagactgcccacctctgtctcccatgtgctgtgattacaggagtgagccaccatgcttggacagtttctcctcttgaatcatcaacagtccctgtaaagtctcaagaaaagtgtttggagtatccataatgtgctaagtcacttaggaacaaagttacacaaaacacatccccagtttttgtctctatgctttcaagatgggtgaaactttatgtttgaagtttcatgttttatgccaagcatgatgagagatagaggaatgggaagacttggtcttacaggttaaagatgtgaaacatacaaaacatgctctcatgagataattagacaaacaagtcagtgtgattgagagcaacatgctgggaactggtttagaggctcctggaggtaaggacagagtcactgttacatgtttggggtattttgctgaagcatcgcagaggcagcattgtcctcgtcaacaggagatggggcgggaggaaaggagagcagagggctgcaaccaaagcaacccagggtccaggtgacagatctcccctattggtaaaatgtgattcatgtggtagcaccgcactgggagcttcagtacctttaactttctctctcaggcttttacacctggtgaacgtctagaataactgccacagaaaatacatctatgacatttaatcactgagtgttcgagagaaggcaaagcccggacaccaagtaagccaggtacccctgaggcaaactccagaggcttccctgggccgtgaaaccagccaaagaaggcaaaattcacccaccctccaaaagacgtttgcgttcccacgcatgttctccgccctgagatagcttagaacacagctctaccaacgacttttcatttccattaacctattcctgattctttgattcaaggaaccttgccatccttagctctttggattatttatgaggtctgatttataatacaaaattatacagtgtaccatagttaaaaccttgaaggaaaaaatgcattttgtatttcttcttcttggagaggcccaaacacccctccccagggttggaaaggagagtggaggtagggtaatggaactccctctcaggcctctgaatatggagaaattaagaagaatgggatggggttgggggacagaggtagtaagcaaacaaatgacttatttttaatctagagttacccatttggagagagatacagggttatatcctaacggtacctttttaaaaaataagtcataagtatgctcatgccctaacaagttagtgaatttttccagtaaaattaaaattaaatagaaagccatggtaaattacccatttcatttctccttctagatttaaaaaaaaaaaaagaggcactttgtcgcttcttactgtgagtgcacttcagccttaatacatgcatttatgtcaagggggccatttacactgttgtctgctggagtttttcttctttcaacttagtagggaatatttgtaatctttattaccccaaataaatctacaaaatgccttttgcttgaggccttttattttaatttcagataaataaatcacattaggttcctggctgtcatattaagataagcatggatctaaaaataacaaaagtgtgttttaagctaatgtctttagattaaatagtggtaaatttctctgggtgacccccaaatcgtattgatgttgggatattttttggtacttttggagtgtttcttgaagaatataaacctgtttaaactagaagtggagtttttaagtcatgtatgggcctacttgtacagtattattcaaatccaagcttcttgcggtggcagtaaatctatcttttaagtacgaatatttccccagttacattagggatcaattttatatctttgttggttaatagtgactccatctatacagtggtttatttattaactataaagatcctagtcctgaatttctcgtcatcctctgtactgttagagcttaaagtcttaaagacaattcaaattcaatgtattccattactgactcttcatcagccctcactccaattctgctcctaatcaagccttggttcaaaatgccacctcctctgggaagccttctttggacttctgcaggacagagtctcctaaaatgtgttttatagaaccccctccatccctcaatgccccagtggaataatcttgataaatgtgaaatgtttcttgcaaacaaggtttagagtgaagaggaagggataaactcccaaggttaggacctaaatatatgttctatgatgaattaaagaacagtgggcagatttgataagaaacaggaaatcacagatagaaagtgagtgcagagttttaccctgaccctttttgtgtctccttgccccagaaaacctggattcaaactctaggcaccccctaattagacacatgcatatcacatacaggtgacctaagtaaactataatgaagatcgatcccaaggtgcaaggtgatatcttctgggtgatctggttcaatcaaaccagatgtctttctggacgtagttctactaaaccctgttgttgctggaagaaaggttcttggaagacagtgatgttatttcatcaggggcttcatggttataagaagcctgaacactcccttgcttctctaaagtatgaccagcagtctataataagtatcctttggtggatagcttatcccatagctctccctacgaccgttcaggaataacataaccattgaagcatgtggcaatacccaatttcgagagccctggtttcatctcccttgtgctggacagagggcatagctgagaggccagactcttatcctggcaggggtctgggactgtctgcatctctgaaacaactcctggtgggtaattggggagtgacatttgatgggtttccagggtggctctggggtctgcacttggctgagaatacagctatgatttagaaattcatcccaagggttgagaacagggaaagataatgtgaggcacgctagccctggtctcctttgacctcagcagggtgaatcagggatgcagaacaggaaaccatgtgctgttattgagttggcatagcgtgatgttttgctttcagagcttttattgctattacagagcactgagctctctctttgtttgctacacattctctccccaagagacagcctcttttcctcttgagggatttaaaaaacaaatcatagttcttattttattcagtgtccaccattaagaattcatgcagagcaattttacttgttgccaattaagagctcccagtggaggtctatgattacagtgaaggcaacctgtttaatactcggcgtccccttagtctacataaattaaccccatgaggatagaggcatgctaattcttaagatgcctggatgataggattcttagatacaggatacacagaaggtacatcttcaagaggctctgggcctgactcttctcagagagcatgtcggctttttcttcttacctgtattttacaactacaagataatttctagataacattttagcaaagaatatttcttcctcaaggatagaataatggcatgtggcctcgcagcaagcaatttctctctctcaatttagagctggagggaacgttagaggcaccagggccattaacctctagctaaaaatgtatagatatatcaaaattatggagaacatgaatgagcattttgagcatggatcattttatttcaatgttcactctacttagttaagacatatttgaatcataaggagaatgaaagcaaagtttttacccaatgttttcctatttctgttcttagaataagaatcacatgcaagccagaaaggaaaggtaaaattccattttaaaaatcttggatatataaaagtaattatcttttttttgctagaagggatgagccttagaggatcttcttctgactagggactatacatgctttaaaaattagtcttttactccccctggtgatgtaggaaaccatcagttcccccgccttgggaagcaagagttaagtcttttacttgggcaaatggtttgtaatcagtagtttagattcttggaagtttgtactgaggctttgacttcccctcaggaaattagtgaggaacttgggattgaggttcctacaggttgactttccccttttaccaacaacccagactcttttccccttttaccaacaactcactgctagatgcccttaagtcacccagcccagtaccagtgaagcaggtggtacaagtcatatgtattctatatttggatagcagttagatagatcaccacttccctcgatatgttccttgaaccttagagtagatgctctaagacagataggatttggagttttatttttaaagtaaaaaataaaattttatatccaatatttgcatatacgcagcacatgttagcaggattaatggctctgagaagttctacaattaaaacaaaatgtttaagacttggttttacctaaaattttaaaaatttatttgaccatggagtaccctcatttttcttaaaatatctatgacatagtgacgcagagtattggtgtttcttggaatatactcaggaaaatgcttgcatagattatttagaccactgatgctcaactgtgagaggggacgactttgtcccttagggaatccttgaaatatgcccagagacatttttgttgtcacaactgagggatactactggcaggtggtgtgaaagccagggatcatcctaaacatcctcccctacaatgaagaattgtctggccccaaatgtcgacagtgccttggttgagaaaccctagtgcagatatagcttgttcaaatgaggcttaggtgatctggaatccgtggttggtagctggcactctgcattcagattttgtcatttgattttgatcatggagacctattactcattcttcattaccttaaggtttttgataaaactgtcaccaatttgacttatgaaaatttgaaataaagatgctaacagtcctttcctgaaacaagcccctccttggctggggaccaaaccaactgcccttataacactaacaaattagccaacaagattagaaattatggctcaggagtcatgcagccagaggccgcaagattcctcacatgtccagctgctcctgtgggtaacatcattatggtaaaaccaaagattggtatttgaggtgtttttcagaccctgcattctcatggatcaactggcaccatccagaaaggtgaactggctcatcaggtcttgcagcccccacccaggaactgactcggcgcaagaagacagcttcgactccctatgatttcatcccgacacaaccaatcagcactccccattctctaacatccccacccccaccgccaaactatcttttaaaaactctgacctctgaatctcggaggaggctgatttgggtagtagtaaaactccagtctcccattaacacaaaaagaaagaatatcttaagtgaatacttggacattatctagttgagctactggcaagttgttagattgttccattagtcatttctactcataggttctttgaagctttctatgacatttgtattatgtagctgtatcattgcataatatttaagtgttatttaaaaacatgtgttttataaatgcaatataatattccagacaccatttcataatctcagtgctgagtaatcttaaatactagctatattaataccttcttttcacagataagaaaactccatttcagagatgttatttagcagccagtttatgcaggccagacaagagtccaagtccccaaaacctccagtccagttttcttcctattgtgtagtattatgctgctctcacttttttatatataattttacatttgtggcttgaaagtaatttcaatgccataagcattcataaattcaatttgtatattccacctgtttattctaaactcttaatatgaggccgcaaatggataaagattttttatcacttgttaggaaagacattttcagcacttttttcttatgtttcttgtcacaaatatatttagccaaatcagaaatagcaacaaatgatataaaaaaattctttttctcctaatattaacttttcacattagaacaaatagaagtacaggaaattatggttgtgtttcaacctgaactagtatacaggttgtcacagtgtgtgtgtgtgtgtgtgtgtgtgtgtgtgtgtgtgtgtgtgttttaaatcaagcagggagatacagagcagattaaactcaccccgacttatgctcaagtcttagactaagttctagattctgactccattctcttctttagatgaattctcagttttcctctttaggaaggatttgttgctatcaaaaagacaattgagcttttaaaggactgctcattgctagacagttatttatgaactccataaattcctttgcaacttgaaaacccagagatagattataggtctatttcaacagaatattagacaggaccccaaaataaccagttatctcaagagtgttattgcaatatatttttgtgtcacagcagatggttatgctataagaaccaactaaagttggttaaagactagcagccccctccatggaggaaaggaaactttttaatctttgcacctagtcctatattatttatccaagtcttattcaccaagtggcaacaagagtatgccttatttcaaccatgcttctgatcagtcctcaaaggtggtagccataaattaatcctgaccacaattattattggaagatctagatgttcagaacttgactctaagttagctccagtataaatggaaggccaccagttaacattagcagcaatgacaaatagcccactccatgacaatggtagcagccacaaatcaaaggcatataaaatcagagaaggagcctatactgatttatgggagcatttgtttaacttcaggcaatctggttgtgcttgtgaacatgacatgctattcccatgatcccctgtatatcacagattctattctaacttatgaacaagcacttaaaaatttaatcataaccagaaaggatttcctacactgttcactgtcactcacatattcttctctaaaaacaatttggctacagttgttgttatgaaattgtaacaaccatcataaagcctgtcactttaagtcagtgaagtcaggatctgttggcaaaaatataatcaaaagtaatttcatgattcaataaatagtatataaatctgctattattggagttcattttctttcaataccacccatttccatcttctcaatggaattattctgactatccaagtgtcattattaccttctattgttatttaaatggagcatttttattagatcctctgacactatatataaggctttgcttcctcagcagtaataattccatttctgaaggaaaatagaagtaactgtacagaaaattctaagctctcactttatgttaactccatgcctgaaatggaattttaatttaatcatatctgagaagacctaggtttttattagctacctcaagaaagtaagaaaaatagccctttccatgcaggttgttttggttcaaagagcccatgaaaccattattcatctataataatgcgtgtaagatacacttactaaccaaattaaactctaaatttctttcatcagatggcattcattattttttgtaaatttttcttttggaagatgggaaaaataaaatattccgtataaatagttgaaataaaacattataccggttatacagttttaaaaatatactttccaagagatctatggaaaatataattaaaaggatacaaccatacatgttattgctgatttaattaatacattggttcacaaaataaaactatcagaatcaggttatagttctcaaagacaaatctagcaaatattgcatcaattacataaaattaactggtgtgcaacatgacgcatgtatacatatgtagtaacaaacctgcacgttgtgcacatgtaccctagaacttaaagtataatttaaaaaaataaaaataaataaataaataaataaataaaaattaactggtgtgtccattagggtcgaacagacttcactgaatttttgttgtatcctaccagcagtttttctatgtatagaaatagaatattctctattactgtaatcagaggtctgtcttccagtataaaaacaaatataagaatataacaaattaaaacatatagcactttacccaagacctagaacgcctgaaagaagataaattttgaggttattagaatttttacagtggcgcaacaagaagaggcaacccggcctggtgaggagccccatggtgatggatttggatgaggtctagcaagaaaacaagagagttagtaagtatttacctgccatctctgtgtacagagagagcactctccccatgccgcaaggagatgaaaagaaataaaggggccgggcccgggggctcacacctgtaatctcagcactttgggagtccaaggcgggtggatcacctgaggtcaggagttcgagaccagcctggccaacatggtgaaacactgtctctactaaaaatacaaaaaaaaattagccgagtgtggcggaaggcacctgtaatcccagctacacgggaggctgaggcaggagaactgcttgaaccagggaggtggaggttgcagtgagccaagttcctgccattgcactccagcctgggcaacaagagcaaatctctgtctcagtcaatcaatcaatcaatgactttaggggcttactgagggtgggtgagacaaatgtacttaataaaacaatttcggtacaatatgaggcatcacgtaattaagcaccagcatatttatttcatagaccgctagcaagactaatgaaaaagagagaagaatcaaatagacacaataaaaaatgataaaggggatatcaccaccgatcccacagaaatacaaactaccatcagagaatactacaaacacctctacgcaaataaactagaaaatctagaagaaatggatacattcctcgacacatacactctcccaagactaaaccaggaagaagttgaatctctgaatagaccaataacaggctctgaaattgtggcaataatcaatagtttaccaaccaaaaagagtccaggaccagatggattcacagccgaattctaccagaggtacaaggaggaactggtaccattccttctgaaactattccaatcaatagaaaaagagggaatcctctctaactcattttatgaggccagcatcattctgataccaaagccgggcagagacacaaccaaaaaagagaattttagacgaatatccttgatgaacactgatgcaaaaatcctcaataaaatactggcaaaccgaatccagcagcacatcaaaaagcttatccaccatgatcaagtgggcttcatccctgggatgcaaggctggttcaatatatgcaaatcaataaatgtaatccagcatataaacagagccaaagacaaaaaccacatgattatctcaatagatgcagaaaaagcctttgacaaaattcaacaacccttcatgctaaaaactctcaattaattaggtattgatgggacgtatttcaaaataataagagctatctatgacaaacccacagccaatatcatactgaatgggcaaaaactggaagcattccctttgaaaactggcacaagacagggatgccctctctcaccgctcctattcaacatagtgttggaagttctggccagcgcaatcaggcaggagaaggaaataaagggtattcaattaggaaaagaggaagtcaaattgtccctgtttgcagacgacatgattgtttatctagaaaaccccatcgtctcagcccaaaatctccttaagctgataagcaacttcagcaaagtctcaggatacaaaatcaatgtacaaaaatcacaagcattcttatacaccaacaacagacaaacagagagccaaagcatgggtgaactcccattcacaattgcttcaaagagaataaaatacctaggaatccaacttacaagggatgtgaaggacctcttcaaggagaactacaaaccactgctcaaggaaataaaagaggacacaaacaaatggaagaacattccatgctcatgggtaggaagaatcaacatcgtgaaaatggccatactgcccaaggtaatttacagattcaatgccatccccatcaagctaccaatgactttcttcacagaattggaaaaaactactttaaagttcatatggaaccaaaaaagagcccgcatcgccaagtcaatcctaagccaaaagaacaaagctggaggcatcacactacctgacttcaaactatactacaaggctacagtaaccaaaacagcatggtactggtaccaaaacagagatatagattaatggaacagaacagagccctcagaaataatgccacatatctacaactatctgatctttgacaaacctgagaaaaacaagcaatggggaaaggattccctatttaataaatggtgctgggaaaactggctagccatatgtagaaagctgaaactggatcccttccttacaccttatacaaaaatcaattcaagatggattaaagatttaaacgttagacctaaaaccataaaaaccctagaagaaaacctaggcattaccattgaggacataggcgtgggcaaggacttcatgtccaaaacaccaaaagcaatggcaacaaaagccaaaattgacaaatgggatctaattaaactaaagagcttctgcacagcaaaagaaactaccatcagagtgaacaggcaacctacaacatgggagaaaattttcgcaacctactcatctgacaaagggctaatatccagaatctacaatgaactcaaacaaatttacaagaaaaaaacaaacaaccccatcaaaaagtgggcaaaggacatgaacagacacttctcaaaagaagacatttatgcagccaaaaaacacatgaagaaatgctcatcatcactggccatcagagaaatgcaaatcaaaaccactatgagatatcatctcacaccagttagaatggccatcattaaaaagtcaggaaacaacaggtgctggagaggatgtggagaaataggaacacttttacactgttggtgggactgtaaactagttcaaccattgtggaagtcagtgtggcgattcctcagggatctagaactggaaataccatttgacccagccatcccattactgggtatatacccaaaggactataaatcatgctgctataaagacacatgcacacgtatgtttattgcggcactattcacaatagcaaagacttggaaccaacccaaatgtccaacaatgatagactggattaagaaaatgtggcacatatacaccatggaatactatgcagccataaaaaatgatgagttcatatcctttgtagggacatggatgaaattggaaaccatcattctcagtaaactatcacaagaacaaaaaaccaaacactgcatattctcactcataggtgggaattgaacaatgagatcacatggacacaggaaggggaatatcacactctggggactgtggtggggtcgggggaggggggatggatagcattgggagatatacctaatgctagatgacacattagtgggtgcagcgcaccagcatggcacatgtatacatatgtaactaacctgcacaatgtgcacatgtaccctaaaacttagagtataataaaaaaataaaaataaaaaaaataaataaataaataaataaataaatcttgaagcaagcaaggatcaaataatttgggctctagttttcacattacaattttgccattccaagatgatagtttcttagaatctaacagtttttagccagacaaggacttagtatatattctgtagtctaactgaaatattttagatcagcaaagctataaaggatgctacctgagcaagcaaataagaacatgaattgaactcacctccagagactcctgtgttgctcctcaagctgagtcagcagatgctcaatgtatttattggagtccatgtattcctgcacaagcagacaaagacagatgaaaactcactatgacagtccccaccatcctaagaccctgaccttatctctacaaggagtatttttgacaacattatccctacttcccttccggttctaggattctctgcttctatgacttgcaatcatatgtaaatactattttttcatgtcctatgatagttttgtaaacaaatcacagaagtgaactgtcattacactgagtcagcattacaatcctcttattcacagaagaaaggcctaaatttcatagtcatctaaactggagtctgtgttctactgtatataaatatttctgccaattatagaaaaagaaaatagacaaaacagttcttgattttactggtcttatgacagtcatgttccagcaaaagtaatgttttcaaactatgtagaatgttttatataaatataatatatacccatattcattgggcacttgtatacactaatggacatgtccatttttcttcaactccatatatacacacaaaacagtgtatttgctttttttttattcttaaacataaatctttggcttctaaaaagacctgaaaggtatggtgtattctgctctatagaaatgtatatgtaaatttatttctctaaatcaaactattttcctgaaatgtatctgaaaaaaaattaaagaattcacgtgttacatgagaagtaagcagaaaaatccataggttattacaatggatttaatttgtgatttctgcatacgaggctcatatgcaatggtgtttcctttgctaacctggagcaaatacaacctatacaaattcttttgtattgttttcctctgaatctggtattttattccctttctgtttagaggtctaccgtgcaggcctctgcttctacattatagcagccgtcgatggaacagtattcaatgatttcaatgttaaggcacccaagaaagctagagttccatttctatagatttgaaataaactgggaactttgattaacagtgacatttttctttcagaaatataggtttcttttgaaatgctatacataatatactgctcttatagaaatattcactataataaggtgaggggctgggagaaagacaggagttgatcccatataatggaaagggaccagtcctgatttcttttgatcctggatctacccatgcggccttgaaaagccttttttaccttcccaaaatgtttgttagactagagggtatactaagtccttgtctagctaaaaactgttatgattctaagatactgtaattctgttatagataattagctaagaagttttatgcttattgaataaacatttattttcaggtgactactcaatagttatttaaacaagaccactgggaatgttaaaaacaaagcagaaagctctgctactgcaggaagttgcaacatacatggttacgcttttaactgtcctgatcaaggctaaaccatgatttagaacacttgacactatcaaatacatgaattctcaaatatgttcagccaagaaaaactaaatacgttgttcccaagtagaaataaatgtacagatcttaaagttattcattttttcttcacttaacaactatttttaaacatctgttagatgcgaagagctgttctaagtgctgcagatacagtaatcatcaagagggggaaagccactgccctcaaggagcttacagtctgtcaaaggggttatactaaataagtgaacggattcgtttcatgttggttacgtgctatgaagtaaacaggtgataggaaagactttgggaggagcagctttgtcacgtgaagactccagaagaagactctaagcaagtgatatttgagctaagacttggaagaggagaaggaaaccatatagagaaaagggagccagacattacaggcagagaaaacaccatatacaaaggtcctgaaatgtgctgttggaggaacagaaggaagccagtgggtgctgggaacagggactcagggatactgggtctaaaatgaagttggacagttaggcaggaccaaatcatgtgcaagccttagaaagcagcttggacttgtcattttgttcattctgattatctcaagtcagaagttgaagctgaaaggtgtagtgatgacaaatgagactttagtatcaaagagactgaggttcaaatcctggttttgatacttactagctatgttcccctggtcacattattaaatctctctaagccttagtttcttcatcttcgtcagagggataaataatgcttcatttatggaggcattgtaagtgttaaacaagaagtttaagtacatacataccatcatgactgccaaatagcaagcatggcctttttcagagtattatgtacctcttttcaaaaggaagatcactttacaaggtgaaggcattattcattttctcttctcttgccaaacttcaagatttttaagtgtacagttcttaggttatacacactaaatattagaataggcagttaggcagagattgataatactgatctctaatctgaatgtagttgtcactggcttgtgatttcaaagctatttcaaataaaaatactagctgcttccatttaaactagctttatcctgttttccatataaataactatgatgacaaatcttaaaccacttaaaaatgggaaactaagattattgattcttcatccctcttttcagctttattttttctctatggcattcttacttccaacattcaatatattttacttatttattaaggtattgcctcaatataacgctaacaaaaatggattgcgaaaagagacattaatcttacatatattttttgttaagtgaaattgtttttgctcaacctgaaataggaagtaccttcatacctgtatcatttctggaccctgaactggaaaagttagttacctaatgtgaaaacactatcataggattataaaataggattactcctagggggaattttgtggatccctttggagattaactccaagaaaacaatggagggtggtagcattggggctggcagtggttaagaggaaactatggtcaccataagtaaaatgctattggcacagtggctgcaagagctttgggagcaagtacatacaggaggttattgtacagagacttcagtatcccagcatgcctgcaaaggcgaaagaaaaggtccagagagattttttcagagtaaactgaaaaaatgcaacatggaacccatgaacaagtactgtaggacaagagagaggacatgatccttaatcataaaagagggtgtgacggtgaaaattatttacataagaaagatatgtaagcattttagaaagagcctcagacatgctgactagtatccagaaagatgtggtctctctgacacatgtgaagaaagttcttttttaatgttgagatgaaaagacagcagaattagattttaaaagataatagggtgagcagccaagataataaaatgacataaaataaagacagggctgagtgagctaagaatttcagggcaacatacaccttacaggcagaatggaaatctatttattgctgtcctgtgattcttattatgaggtgactctccctaccatgaaatggtgcttcagagaaagcaggcaacaggttttggtgtattggcactgaatcgttcatacagatgaaagtctatttctcaatatctcatttgggaaacaatcaaattccccaacccaggccaggtacttacatactcctcttctcctatttctacagtataagtcaattagtgtacgtatcattcagttagtgaagagcaagcatcctgtcatctagggagaaaaaataaacacccatatccacatatcccttgatgtcagtgttcactattcctaacacatatctatgaaaaatatcaatttcccaagccttgctttgttcagcatgcaacttcctacctcattcagcacaaagatactattaaactattgttactaacttgatgaacatcctattctactggtttctgttagaattacgaaacccaccttagatacaataaacagtagaattgacaacgaaaacttacatacagtcctgaggaggataaacttaatctgtaactaaattaagaaataaaggataaggatgaaaatgaatgcagatgtgattgataaaaaggccagaaaatatcagtttgtcaaacaatgatagaatttgagtacttgataagatttgaaatgcaaacaacaaacaaagggataaagaaatatttcagcacaggggaaaaaataaggacgtgattatgtacatcaaaaggactcatcactttccaggtagagttaacggaaaacaatccacacatctattggcacaagagttgaaaaaaaatagtgaagaaaaaaaagggggacttgtttgaatgcttatagctcaacaaggagcaaaaccacatagctccatagcttccagccaccccaaatgcccattgaaattagtttatagacaaaccataaatattattcccaattaagtagctcctatataacaaagcaacagaaagacattctcaggcattcatgaattcataaaatacaggacctacatcttttaattaaaaacttatgtttttatgcatatgtgtataaccaaaaggtgtctgtgtgcaggtaagtatatgtacatatactatgcattatctatgcacatatgtaatacctgagcaaagaataaaaaaatatggaattcacaatataaaaagaggcttcaaaggaggttcatccccccaaaaagatgttttaaaaagtaattacaaaacaaacataaaatcccagagagaaaaagtggaatatacattatctatttttgtgatgggcagaaggaggacaagagggaaagaaagagggaactgttaatagaagggtgcataaatcactttgaatataggggaagaaattattgttctatttttttttttttttttttttttttttgagacggagtctcgctctgtcgcccaggctggagtgcagtggcgggatctcggctcactgcaagctccgcctcccgggttcacgccattctcccacctcagcctcccgagtagctgggactacaggcgcccgccaccacgcccggctaattttttgtatttttagtagagacggggtttcaccattttagccgggatggtctcgatctcctgaccttgtgatccgcccgcctcggcctcccaaagtgctgggattacaggcgtgagccaccgcgcccggctattgttctatttttgactcgataataaaaaatgcttaagtataagggtgtgttttgcctgtgtatgtacaactggggaaagcaatttggtgatccatgttgtgattttaagacatccgtgcccttttgatgtagaaactccctgtctagaaatcagcctgaggaaataatcagatgaaagcaaatgatattcattgaaatactatttgtgacaatatgaaaagactgggtatgtcttattttccaaaactatagaaataattaaaataaagcatgcttttttcgtttgaagaaatacaattcttttttttttttttttttttttttttttttgagacggagtcttgctctgtcgcccaggccggactgcggactgcagtggcgcaatctcggctcactgcaagctctctgcttcccgggttcacgccattctcctgcctcagcctcccgagtagctgggattacaggcgcccgccaccgcgcccggctaattttttgtatttttagtagagacggggtttcaccttgttagccaggatggtctcgatctcctgacctcatgatccacccgcctcggcctcccaaagtgctgggattacaggcgtgagccaccgcgcccggccgaagaaatacaattcttaaactttgtaaagaatatataataaagtagaaaacagtgtaatgctaagtgaaagaaggataaaaaaactgcacaatccctcttatcacaatttagaaaatatatatgaaagattaaaagtaatatcctacagtaaatggtaatattatgggctaatttaattttcttctgtaaattttttctttgtctatagttttacaaaactatatgctcattataaaaatttaaagtaatggatattatatagaaaaatacagtcccagaaaataatgtccatgaagatttgattataaattttagaaagcttgatctgaaataccacaaggaaaccatttcctttatattattctaaagctaggctcatgtttgaaacaatgaacccccctttccacttgccctcgttagtgttctgataaaagcatttcaccaaagttaggattaagggggctgaaggtggggggcaccaagttacaccaagtcatattttatgttttaaaaattttacaaaggtacagcattaaaaagacatctgttccctggctaaaacttatgcaaattagaatcattttagagatatatttcaggaagtttgcctttcacttcttttaatgcacatgtttcagggcaattagtatgaaacatttaaagtgattagaggtttatagatacactgaacattgcaggtctttgtagcataagcccatttaatgtgaatctcctattgtctgaaataggtcagttctgagagaggcccattataaatgaattctaatgatgtgaggatcttaagtatcattcatattaagtggagtttaaaataaaatcgtgtatcaaagcttgcagagatccaaaaatccctccaaataatcttcgtattataatcagcataacttatggcagagcttgtgaaatcctgccagcaattttgtgactagtaacatagaatccccaattcacctttgggcaaagcagcaccagcaaggcggccagctgttcaaatcaacacaactatctgcaattaggaaatgactaactaccacaacaaagtaatttttaagcgggggagggcatcagttcttctcttaataaaaaggtatacctgcatggtgaatgcaaaaaactcaaataaaatacccactttgggaactatacagacaaggtaataaatagaaaggtgtctcataactaactggcatctgtaccaatataaattcttccgaggagacttttttaaatgttaaacaccacaagcaaatcaatttaggagtcccagcttgaacagatccatcctcccaccgccatcttagcatcagccatcttgaattcctctttcccattgcctcctcaaacagctgcaacctggcttctaaggcagactttctagtggagctttcccattagagcaaatgatggcctccgcaaggtggaatcccaggattttgcttggtccttgtcttatgaccagtgcctacagcacttcacattttaaaatcatactctccctccctggtattctctgaaagtgtctccccgtattccatcactctgaggtccagcatggcctgtgctgctcaatcacgctctgcaggtccaatcctgtgagtctggctatttcccaaacaggtccctttggatgtgccacatactctttcgagtaggccatccttcatttctgtgtcctccaacacctaccacagcccttggaacatctcaagcactcaaaggtgtgttaagtaagtgaaagagtgaattaattgtctggatgtaaccaggctcatgagagaatctgagattaggctataagtggtcttggtcttccaaaacttttacttgtaaaggttttgatgatcatggagacattaggcagtcatgacaagatggcagaaacagtgtttttgttttgttttccctctcctctcatacaccactcaatgtgatgcttctgacagcagatgaatgggaatttttccctatacgtcaaccaaacaattctccagcagacaccagctaggtgtcctaaaatttaactcaattctgacacgatctacctggagatagcatcacatccctcagggtgagggctcagtcccataagactgccccggcttcagacaccaatcacaagtaccacagtgggctgccacctataattctgatcagccagctataaatcagggttcccaccacaacatcctcaagcttgattaatttgctacagcagttcacagaactcaaggaagcattttacttaggtttacccatttattgtaagtgatattacaaacgatacagataaacagctagatggaagagctgcataggacgaggtatgggagaaggggttcagaacttccatgctctctcctggcacactgccctccaggaacttccatgagttcagctatctggaagccccttgagcccagtcctcctgggttttatggaggatgtattaggtaggaatgactgattacatcattggccattggtggtcaactcaaccagagcttggtaggtagggctgaaagttccaaccctttaatcacatgtttggctctcctggcaaccagcccccatcctgaggctatccaggagcccacagtcttctaaatagaacaaaagatgatcctatcacccagaaaattctaagggatttaagagctctgtgccagatgttatcactcagaaaataagaaacgttttaggatctctgtgtcagaaaccaggagtcaaagaccaaatattagaacaaaaggttatcctagtaccctatctacaagggttttaggagttctgtgccagaaactgggaagcagagaccgaatatatatatttaatcctagcagttttctaaattactttttactcatgattttattctattggtactagccagaaatgacattccaaactattgataatttcacaaaataagtgcgtttttctaatcttgcaactctgagaaaaatttaggtacattgctcatctatggcatgtaaatcacatgagctgtcaaagatttcaacacagtaaaattcacaaccaaaatttgctttcaaatggagagataactgatgataagaaagcatgatgactagcaaactgcacagagtgaaaacatctctttataacctctgtcatatatggaaatttcatcagtatgaattaacagtgacagaatttagacagatagcacatgagaccattgaaaagcctcgtgacctgttatttggtaccaaggcagtagactaatgccgatcagactatgagtacagcttagcagatcttcagagtaaaacatacttcaatttgttggatactgcttaactgttccctattagatatttttccccttttaaaaaaaatcccccatctctctccagctgtagctggacacactgctcccaagctagaaattatgtttcccagtctcctgtgcttcttggggtgaacacgtgcctgagttcaagccaaagagaggtaagcagaaatggtttgtgcaatatccaggaaatccccagcctaaagacaagacactgcctattgtgcactcttcccctggccagaaacggtgaagccttgggctcagagacagtcctacatgctaaggatagctaaagtgatagttcttagagcacctatctactgaccctagtctttctacctccctttggcctaaataagatagaaataaattcctatcttaattaaaacactgtattttgggctttctttgttactgtacacctagcctatgctacaagtaatataaatattggtcaattcttttcaaagttaacatggcaaactgtgaaatacgaagcagcagtcatctctatattactttattgattgatgttgtttgtagatgttatagttttccaaagcactttgacatccattcacatttaagcctcacaacatctttgagtcatggtcaccatttcaatttagaaaactaatgctcagattatggttaagtaatttgcttagggtcagacaataacagactttaaaagtctgtttttgctcagttcagcacattttttcactgccctaaagaatgcccttcccacagctaactgccctcagagtggattttatgttggttagatggaaactagctacagaatgaccccctccaccgcagccctctccaccaatttgtagtgtgtgctggggggaatctggctagatgcaaagccataaaacaaaaatcaagaaatgagttttcaaattctaccaattgggcatctgtgtaagtttggctttggttccactttgatttccctgccctagtgcaatgagggtgagggcagaagttaagttgtattctcccattcagtattctattctattaataataatgaaataaatctacacaaaagttaaacaatttttagttatatttgacaaagatgctattactaatacttagatattcttttttaggtaaaaagagttatacttatttttcagcaaaatagtaactattgtatttctcagcagcctgtactattttcttaaatattgtttctatagcagcttgggagataaacatatattggtcaaatgaaggaattcatttaggtggaaaaaataagttcacttattttgtttttgttttttttttctgaggtagaaataaaaactaattcaactgtcctcaagttctgcaagtcagtaacatgtcatttgtcagcatggcagtaattgtgtatgtttttaaaaagtcaccataaaaatacaaatgacataattagaagagtcctcatttcaacctctatttttcatttgatggagaaacactggtagagccttatatgagtgaaaagtcttaggaccccagctactctacatgaaagaatttggccatggaaagttcaaagactaatttaaatcccagcattacatccacacacagcaggaattgaccaatgatccattgcatcagtacactgtactttcagacatttccttctacccaaatactggatcacggactgccatttcattcactacagtatatcaggaccgcctgagcctatgattatcaatatcattcaaaatctggccaggtatgttctaattttctctcccattactccccaaagctatcctgggagtccagtgaagccaggctccttgctttttctgaacaggccaagttataagttctttgcagtctcagcacctagcacaagacctgcaaataatagatggcaaggcatttctagaaaccagggtttctagaaactggaattgggttacggcatcaagtagggaaaacacatttgtttgctgctacttatggctcccatctgttcatctgagtcacctggtgggctagttaaaacacagattactgggtcctgaccccagagtttgattcagtgggcatgcaatggagcctgatattttgcatctctgagaagctcccaggtgtttctaatgctgctggtctggggaccactctgtaaatcactggcttatggtaaccaggattagtttactgattaccccgattaccacccactgtcctcctaaagagattaataaggccagtgtaaataatgccagatgcaattattctgcaaatattttcaagggttaattatgttcaggcactcttcaaggtctgggcaatacagccatgtacagtgcaggcaagtctctgcctgcatgaaggtaacatttttgtgagggagacagacaaaataagtggaggtaagtggaaaaacaaaatagagaagaggaaaggaggggctgaagtagaggggtggcatcaacatagactggtggaggaagaccacactgaagacatttgagcaaacacctaaaggaagtgacggaactaaccgaggtggctactttgggaggctcattctaggcagacaaaaccagcgtaaaggactctaggggcaggaatgtgtgccggcatgctgcaggaacagcacagaggccagtgtggctggagtgcagagatggggtgaggggaggagggtgatcatcacagctgcataagcccttgtagggactttgcattttgttctcagtgacatagggaacaattgcagtgggatttgatttgaggagtcaaatggtatcacttaagtcttgaatggatccttctggctgctgttgactgaaggaatagggggcaggggcaggagcagctgaggccactggaaggagatcaacatcactttcactagggaggtcaccaggagaatcatgctaagttgttggattcaggatctgtttcgaagatggaggtaacagaacttcatgatggattcaatgtgggatatgaaataaaataaaaatcgaagataatatttgatttggggcctgagcagttggataatgtgctattttggggtaaatttgtgcaaggggtgttgaataaattgttctcctttggcagtgaagtttgtgacgtcattacatatgaaagagtagatgtcaaccaggtcgttagtgctcaagaattttggattccagtgtgtatggatataaacatggagccgtgacatcgaatgggattacctgaggaaggaaccacagtaaagaaaaaaggacctagtacttggaggttgagaggagaaaaaaaaaaaagtaaatgaaggagaggccagtgagggaggaacaggagaaggtgttctaagaagaaagtagtgttaaatacaatcagtggtcaagtaagacaggcccccaaattggccaccaaattggccaatatagtggccattagcggcccgacaaaaacagtttcagtggaggagcctttccaaatacctcacttggggtagaggttggggaaaggtgaagaataaagacaaaattttatgccaagggtagggagaacaagtaagaacaaagctttttcagaaaatatcataaatatcatgtgattcttgaaaatcagtctccaagagaccatggggctacggaggcccttgggaaaagggtgcattccaggtcctatcccagagattcaggttcagtaagtctaggaataagatgggacccagagatgtaattttaacaagaacttgtaggaggatgttgccagttctccttgggacacttttggagaatggtctcccaaacagaatttctggttatttccgatgacttaacacaacaaaacaaaccaactgccacaaccaccatgcaaccaacacactgaacctttccttgaaacacctccaatacctattctaccaaagtgaatcagggccttggattctcttgacattcaaatgagattggggacaaggtgataaacatgaagactttttagaaacagagcagatggtgcttctcatgttggatctaggaactcttttaggaaaacctagactgcctatcccaggaagactccttttgctacacaagaggaccgtcaaactatttaaaaattttgtttcgtttttatatttatctttaagagacttccctcaagaaagaggttacttcctgcagtgtgaggagattatacatttatgcactaacacataaaccttgcttggattttattttctaagccagaaagcatttgtggatgtgcagatttcagtgtgttgcctgttaaactgcatttcttacttatgggcactgaacataaatcacccaagaggagcgaacattcctcctggagtgaggtatttcaaagactgcctctactgccgctgggtgggaatgggtggtgcccaggatctgatcacatttatgtctctattttcatggtaaaaatgtgaagacaaaagtaatggaccagatctgagttctcctggctgtcatgggctgcaggctgttgtttgtattaagcagctgaacactgtttgacttgtcttggtgaaaagaaacactagctctatcttgttgcttctcctccaacaaaaaggcagcagaacaagtgaatcaccatgactgaccagcatgttttcttcttacccctaaatctcttctccatattaagagatatactaaggagaccataggcatttatttccctgccactggcctcaggaaataaaggatggagcgcctgaagagaccttctcagacctagtattttgcacatgccctcacaaaaaataaacgtgtatcaccaatagagaacatgaaagcaaaccaaaagtcataaagcattctggaagtcagaaagaagtttccatttgattgacaaaagctgcaaaaccagaacccaaaacacatccaggataaaatcaccatgaagatgaggactgaactgggaaaaactgcaagctcagattgaacataagagcaggagggacctcttgggcaatcgtctgtgtgatatttaagtatggtattccatggccacccccctccttccagcaagtggtaggagagattgaactcaagataaagaactgttctctactgaggattagtttccatctaaggaggtagagccatgaggctgggtggggttttggggttgggttctgtgcaggtgtggaggcgtcaccagggctgaattcatgggcacctccccgcagacactgtaggcctattcaatagaacctgctctccagtcaaggctgccaactcagagggcttctaatgttatgtggagagccctgcatccttcgccagctgtagccgacttagtgctgaaaacacttgaacttgcccaacatcctccacaaagaggccaactctatagaaagacacttagcttcctaaggactggttaattggtatttcaatgtgatgccctatgccaacaccaggactggtataatgggtataggtgcaaagcaggacccatctggctggcaatcctcatttcagatctttacatctgaccatgaaaaggccaagctggaaacaaaagggtggcagagtaagaatgagggcctctgcctcctggaaacagaggaatcccttcagggggctgtgtatattttcactgtgcagctcctctttctcgtttgctatcttagcaagccctgtcaaggaagaatgtggaaaagggaaacagtgggaaaacaggaactcctgatactacagaacccttttctccttcaactttacctccagagactgagcctatgtcatagttgattctctaataccagcataaacagctttcaggagaatcatgcctcagtcaattgccaatcatacagggaagattttaggatggtttaagaagatggagagaaaggatttatgaagtagtagatacccatccctgccccacccaaaataaacaactcagtagcatatacttctcttttttccaataaagagactgtcgttaaatacaatctgtttcttggcttcttctgctctcaactctagcttgtaatatgtgaagtaatttgagattatcctcagaagttccacagatatcttgtggtacaaaatgattaccaatactgtgattaaaaagtgcttttataggtggtaacctggagggctgatacaacctgatgtaaacagcactgctgccttgtttgaaaggtaattagaaagccattttgttctgacagtggagaatccgattcaggagaaaagtttcttctctcctgaggggccaaaccaaatatgtgatggaatatagctgtggcactctttgaaccttctcattggaaaatctggagagaaatgggacatacggcaacttttaagttgaaagcccttgtgcccagggcccctgtctctgtgccagtccatccctggaagagcaatggtgcaatgcaataactcagcgctgcccttcacatgatggtggctggtatgctcccctgggttctacctgggatgaccaaatggtacccttagcctccactgaacacccacttcacaaagacacattatcctgacaattaagatctaatgcaacggttctcccactatggacacagaccagcattgttaacatcacctgcaaatttcattagaaatgcaacttctctggcctttccccaggcccactgaactctgggggtggaggggcccaacaatgtatggttttaggagccctccaggtgattctgatccactaaaccttaagaacgactcttcaatagtcaaattaacccatcattacaatcattcattccaggtgtgtgagccacccctccccccccgcccccttccaccccctgcattttcaagataaatcatttgacgctatagtgaatttgaattactatcagcattgatgaacaattcaaggtttcttttcaaaatatctcatttttgagggtagagggctgggaaatcagaccttgcatcaggtgaaacactgaagtttaattaaaataatgcaaaaccagcaacagctgccctgctgtgaagcctatgtttgtacttaatgatttaggtgctgtttttcaggacgagagaagtacccatgataaatatgatgcaggtgcacccgggatgttacctttttttttaagtatctcctctcaaagcgttatgcagctaaaaccattcaatcagtggactatgcactatttgggatttgaagagacacctggaccatgtaagaattttgtattgggacggtcacctaagacagaaattcctttttaaaatatacatatttgggatagcaacgcagacagttcacttaccagtggatagtaatttaactattctaatgcttatttttcatgaaaatcagccactcttagacaaggcagatgtgttaaatcaatttaggaaggcaatttactatgatgaggttgttaaagagtcaaacggaacatcaggaaacttatgcaaatatttttgggaatttgttctgagtatgcaaatgctatataattagttatcatgcttttcatgcaaaattaaatttgctataataacgaatcacactcaagaataaggctagttaacatgaaaagaaccctcatttttatgactgaaagactgcaaattgagggtaaactgcaggtgaatctaattccagcctttaggattattattcattccggtcaaacgaaaccaactgcaacaagggatgggagggctctctgactctggacagcacatgtatggatgcaaaaatcacaaggagtagaagcaatggagtgttgtgctttttggactaaggctgtctcagctatcattagccagatactcttttaccctctaattattttggaaggactcagtgctatcatttaatatttatcagactagcaaagccaaacttctattttggaatatctctaaagtctaattactgctcagtcccttcctgccccagactgacaatttggagataatttggacttccagcatgttggctcttcctgcctcactctgtaaatgtccccacttgtcacggggctctctagacctcctctcgctgtcaaagtcctatgtctgctatatttgccaggctatgtaataattaggcccttggctgggtgcggtggctcacgcctgtaatcccagcactttgggaggccaaggtgggcagatcacgaggtcaggagatcgagaccatcctggctaacatggtgaaaccccgtctctactaaaaatacagaaaattagccaggcgtggtggtgggcacccgtagtcccagctactcgggaggctgaggcaggggaatggtgtgaacccggaaggcggagcttgcagtgagccgagatcacaccactgcactccagcgagactctgtctcaaataaacaacaaaacaaacaaacaaaaaaaaagaaaagaaaaaggccctttatgcctcctggccacttgtagaccactcccatttggccaggaatgagacatgttccatagcatgaaactttctgtgatgacgctggagaagtcctgagcaaaccaggtgagttggtcactctaccacaatcacacgtttccccatgactcccaggctgtttgcccattcctgtgggtgtcagttttcctaactatgcttcaaattcctcactggagtaggcttagccataacttctagtgctgcagactagccctaaccccaggagtcgtgtatgctcatctgctatccactaaagaagtggaggctccatccagtgagcctgatcactgacccatgtcttgccttatcccaggtggactgctcaggaataaaggggtttccagctgcctgaggactgacaaagggttccttctgtcacctccccagatcggagcctcaaagataccagtttgcatcacagccacccccatcccaccctcacccaatctgtgattagactcagtgcccttcagtgggactagcactttacctaggttaggctcagttatattcttgctttatacctactccacaccggatcattgtggaggtcccaggttttacctaaaaataccttgcaacctactattaaaagtgaagactgcacctgaacattcatgttgtctttacacataggatcacaagatactgttgatacagaatctagagttgtcaagtactttgtcatattaagcttacaatgacaaaactaggttttagtagcatgattttaggacaaaaaggaacccaaagccatacatttgaagactacatctatcccttagactgaaaagtcagacatggtagaaatgttttataaaagaagagaaaagcgggaaatgaatgccttgctgcccatagagacgtccagttttctgttgaggctggctgttaaaagtacctgactccattggtttcaataaatagctcaatcaccttgttcttgctaaagctcaagctcaataacccaatattccctagccacatacaatgcatttaacccttttcctcattatcccacttaagctaaaaaacaagacaaaacacaaacaggatagccagatgaactcttaattccaaaacaatatcaattgaattcactccatttgctagtactgccttctcaaccatgccttgtcttagctcaatattaattaggtaaaacttaatagtcatgcaacctggcccacatcaaaaattatatacctataaaaatgtgcatttttctagtttttatacatttcatacttcgtctcataagtcattctgtaaagtgagtgtcattccctcatttgtcacttttgtaaagcccatcttataaaggtttatttagcagaaaggctaatagattttattaataggcatagtctttccaacctgtaaaaacaccaatacttaagtcaaatatttttgtacccactatgcaaatagtactttgctaaaaacatcaccgttagcctaggagaatgagacaaagcatagatgcaagaaagttctatgcagtaagtgatacagacattttacagcaaaaaggtatcatctgtgattgagatccagaggcaggtagaaatgaaagcttagagagtgagcttgtggaaagataattgataaactacattttacatgatactttattttcaacactccattacaaagtttgcttaattatcttttacaacataccagtaaaacagtgtgtctgtctctgtattactgatgagaaacctgggctcatagagttcaagtaacaatatctgagtgggtagttgaaaacaaaatgttacactaaatcattaaaagtaaaagttgaaaaattatctttctagtaattttcaccacccatccaggatattcttctaacaattgcatttgagaatctatcctgggggatgagaccctaggacacatagaagctatgtggaccttgagtactttgggtctatttccttatttataaaatgaagagatggggccagatcagtggttagcaaacctcagccagcactagtaccacctggagagcttgctaaaacagactgcagggtcccacccccaagaatttctgattcagcacatctggggtgagacctgaaaatttgcatttctaacaaattatcaggtgaggtggatgttgatgctgcttgtccagggaccactttgagaactactagactggtctttagggcctctaggattttgagtatggaaagacagacaatattcttaacttctagaccagctgcaagtaagagttccctcatttatccttccacctattcattcaacaaatggacacttgttggtttgtgaacaagtgtgttttcaaatagttccaagtttgcctaaaagtagggaaaaatctcaattatttaattgatatcatttatggatatttggcaattttctttaactctatttcgtgatcatgtaaaatcaggaaaaaatcaattaaatcaggaaatgcatgcaaaaattattaacagtgtctgacatagagatctcagcaaacattagttctatggatcagggaaacaatttacatatcatattgcacttttgcctctcatatttttattccagctgctagcatctatcctatttcagcatctcagggttttcctcctcatcctttgttggagaagctgatgaagttagcaaggcttgggtcacggtaatactgagggagggataggctgggttaaagaggagagaatgattatatgcgaactatatgactggttcctaacaaaagttaatggattaaatacaaaatccctgcccttcagtgtgttccagctctcattagtgccaactgcatctcaaggcacacctttctcctgtgccacctatgtccttggcatacagttggagcaggagatgggggcgctactggcagccaaagaaatggacagaaccagtgtgattgtctggggaatctgacagagaggtaaattgaacttaatcactgtcccagccaaatcacatttgtaaaggctgaggctctgtggacacctgttataaataaagcaattcctaatgtttttctacaagacctgagcctttggttgatctcagtttctcagtataagaaccatttttctcacccagggcctggcatcagcaatttggtgttatgtcccaagaaattccccaaaactcctgggatggcacaaagttgtcctagctatgtgagttagactctgagctccagacagaaatactcatttccaggttcagcttctaaaaatacctgccttcacgtatgtcctttggctccgggaggtttccaaactacaaccaaagtctgagatgaaaacttaaagaaggctagactgcatgaaatttacctcacctatcccggcacaagccagaactggatgaggcgtaaaccaggcctgctgtgcaaacagatgcattctacctctggggatggctcaagggaatcataaacaccccacattgagagggcaggaggcctgagtggcatttaggtttctctgaggcttattttgtgaaagcaaaactgactcactgagaaaacattttaaaaatatttacttggaattacataaaaaatattttaaatgatttttgttttttcagaggtaggaaagtctgttttatagctggctgctgagtcagacagaatagccggaaagactttgggaaacctcagcctctctttggcctctgcagttgtgaggccgggagatgtggttctgaaacccaggcaagttgctgaagcacacagaggaattcccagaatttcctctaaagttttcacttagatgtcacaaagaaggcctgatttcagcgaaataaaagtttgttgcagagtcacacatgagcaccagttgtaactaagaaaatatatatatacattctaaagcacatactgtattccaagtgcttttttttttcttttcttttttgagacggagcctggctctgtcgcccaggctggagtgcagtggcacgatctcggctcactgcaaccttcaccgcctgggttcaagtgattcttttgcctcagcctcccaagtatctgggattacaggcacccagataatttttgtatttgtagtagagacggagtttcaccatgttgaccaggctggtctcgaagtcctgacctcaggtgatccacatgccttgacctcctaaagtgctgggattgcaggcaagagccaccacgcccagcctgccaagtacttttaaaatgtattcatttgattattcactcgaattcttctgagcacctgttatgtgtagtgctaggagccgttggatataactgtgaaaaaaatggacgatgtctccttccatcactgccgtattcaatctacctgggagggaggaaggcactggaatgcagaaccatagctttaccatgttaagccactttcccaactgtacacagggaaagagccagagaaatttgaacaggattttgcgtctccaaagtgtgtactctggcctttggggaaggatggatccaaacataaaggaagaagaaaactagatgactccagcttatgaagatagcatttatgtattcccctaagtgcctacataaacctgagaataaggtactcttctaacagaaattggcattcctttttagtacagggactttgtgatgtttcctgagggatttccatgtactgcaactcattttaattatttcaaccctagccttccctaagctcttgcatctctagtttctacagccaaccatatactggttttaggggtgttgaattgctcagttattgttgggtgcaggcactggacatttgttattttggagtacatcaagcccccttccttgtggggatcactcccccgcagctctgtgcactctatctgctcccagggtagagtttgtgacctgaatgaaagctagttaacacaccacatttgcctggagatgtcaactggttcaatgatgggcactggacctaatcagaaccaatgagactaacatgagaatggcatctctgctagccttggcctcccaacttcagcatttgagtactcactgacacctggacccatcatacattgtgtttggatatgacccccctcttaaaaatgcttgcaatgtttatttttgccggatgtcatcaaaaagaagttgttgatggtgtgtgctggagttggtaaagctgaaactacccaaatggctgtcactagagggccaataatgatgctgtctttcagcacttcttgttaatacgtaactagaatcatgcagctctcttctttaatttgttctggacagtgggccactttagggatgaactgctcagcatttctggcagaggaacagcaaccccttaggatatccttgattgaaaaactataaggccgggcacagtggctcaggcctgtaatcccagcactttgggaggccgaggcaggcggatcacgagctcaggagattgaggccatcctggccaacacggtgaaaccctgtctctactgaaaatacaaaaattagctgggcatggtggcacatgcttgtaatcccagctacttgggaggctgaggcaggagaatcacatgaaccagggagttggaggttgcagtgagccgagttcacaccactactgcactccagcctggtgacagagcaagactcagtctcaacaaaaaaaaaaaaaaaaaaaaaagagaaaaagaaagacaacaaagctggtcacagagctggtaaactggggacagccacagcaagagtcctgtaacagcagagaacagtcctccattccctcggagacattttccagctctttatttgaaatgctttgcagaaacctggaattctggacattatggttattaatataaagactcctatcattccatagctcccatctccactgacctctaccccatctctaatgacctgttacagctttgacgtcactctcagagcaggatttaatgatgactcatctttgatacctcttcctgcgtaaattcaacagcatcctggctgctcacagtagagtgcatttaccagaaacagcagcatttcctgggtgcttgctggaaatgcagcatctcagattccacttcagaccaactgaatcagaatctgttcaagaatcggcttctaacatactcgcaactgctgctgctgctgctgccgccagcctgggaaccacattctgagtagcaggaatgtagacctcagtgtttcctaaccgtactgatcataagttctgttggggagcttcttcaaaatacctgtttctgggcacaacttcaaaccctttgaatcagaatcttcagaaaagggactttggtatttacagccagcccaggtggttcttctggatgggcaaacagaggaaacactgggaatctaatttagagttctaggccgagctctcagctgcctgctcttctcctgcctgaatttgttgcttaacagatggaagcacaatacagcttccactagggctgtttctttttcccttttgttcctccaaagacttgctaccaaatgctgtgtcttcagcatctggaattgtttttttaccttctctctatgcagttaggtaagaaaggaccttggaaggattcaaatcccaattctaggcaaagatatgttaatagtcacatcccagtggcaatgctgtttaatgttagtgttttgaagacaaaatgcagattcctggccctggttgttctgcaggttgtagccttaataaactggttggtctgagtacataagttttcttgaggactgacaaaatgcaagaacagtgttagtaatggaagaaaggaataaaaatgataaccctgtccatctaggatgtaggaaaacagtatttgttaaggttttctacatctttgaaaaactggtaaataatatagttgcctaaaattcttaggatctttgttaattgcttcaatatttttccttccttagccttggattttttataagacagtagcgacattaatacctgcagggctcctcatgtgaagactaaaagtgaatgcatagaccagtgcttctcagtgggggatgacttcatatcccaggagacactgttgtctgtcatacctgggagagaggggctggtactggctgttagtgggtaggagccagggatgctgctaagcatcctacaatgcccaggatagcccccaccgcagagattattgagccccaagtagtgcccaggttgatctagaccaaatactctccacatcttcagagcttaatgatcatcaccctgttgtctctctaccaacgttgggccccaagttacccgattggtagaaccaagatttgaaaaaatgttcctctgcctccagagctgtattcttttcatcccaacgtgctgactcccactggtagcagactatggtaattttttcgtgttgatttataggagtgctgcaaattgcaaatcctgttctcagtcccccaaattcgctgcgtatctgctctcattatgtcattttcagatggagaatagagggttgaggcttggagcaacagaggaagcagaatatagagagagttgacatagactgggatttttatctattttgttttaaacagagtaactgagctcttataagaatcaagagatttaaaacttaatacattttaggggggaaagccgaagactcaactacagaggcagaaggagaagtaggctggaagtaactaacaatttctgacttgtggtgccaccaggtagagctcctggagtctccactgcctgggcagtccttgacatcctttgagagccaaagtgttaaatatgtaagagcactggataatgaacacgtaattggagcatgggaaaaatcagacactgtgaactcgattatgatatgttggtaacaaggagtgaaagcacctaacctattcagtgagattactgatgaaaaatatatataatgaaaaaaatatataaatattattcaaagggtagactagctgcagtgcctcatgtttaatttaaaatacacttgcatttcaacctcagatgagcagttctgaaatgtcatgaaatgctgggaactttcatggaaagaaaaacttgcggcaatcataatattagaatttgtttgccctagggtgtccataatcttagaacaaaaaatactctttatgtggaaataccttgtagttactaggagccttttattataaagaaaaagaaaggcaataaaaaggaattcattctaaggaggtgtttagagtttcctttaactgtttcctttacccacatagcttgccgttaatacttctctattaagctttcagaaagaggaattgcattttccacctcgctgaagaggcatgagagtggtacacttgggctatactgagatggaggcttcgctgacagcagccatccagatctgggtctgctttcctttttcaccttattagctattcccacctcatagtccacaggcctgtggagggggcaggggacaaccaggggacagccacgtggacagggagcaagggaggaggggctggggaaagcacctaaaagaagagggagtaccaagcatgccttaaatatctcacaggtttccagttggcctagcaaaaaaagagatgatatagagatgtacacaggggagcgccaggtagaatctacctaccaaggacaccactggtcttcataaagaatagccaagtgttatggaagagaaaaggagaataaatctgacaaaagtggggggtattgaaagatgggcaaggtgtttggaaagaaacagaaagggaggatgggcttagcaaatgagcagactatataagcccactggaattgtcaaaattaaggttacacacaagggagaacatctgtatcatgacacattgaaataataagtatattaatttacttatcacatccaatgctaagacagattatgtaccttttgtaactcctgaattctccagaatttaaaaaatgctaaagaagacacacactgtaccccaaaggtgagaaaaaggagtggttgcccaagacccctcttctgttcaacttcatgaattcacctgtggaatcttttaaaatagggattctgagagattcttctggtttgtgaggaatctgagttttttaaaggctctccagatatacccctgaacaaccttttaccggaggggccagcgtctaagacactatgaaagataaagagtataatactgagcattattttccagattttggagggaatgtggccaagaaagcaagacctttttttttttttttttttttttttttttctgagacagggtctcactctgtcaccaaggctggagagcagtggtgcaatcatggctcaatgcagcctctacatcccaggctcaagtgatccttccagctcagcctcctgaatatgggtttacaggcatgcaccaccacacccagctactttattttttgtatttttttttttttttttttttgtagagatggggtttcaccatgtgtcacaggctggtctcaatcccctgggctcaagtgatctgcctgcctcagcctcccagagtgctgggtttacagacatgatacaccatgcctggcttacattgtttttgttttttttttttcttattaaatgtatcaataatttttttatttaaaaaaaggacacgttttgtgttgccttttaaaaatacatgttgtagcaagcatataatatctattaacaaaaagaaaaaatagtttgcaaaactcttaattataactttatttgatatgtaactttctgcatcatatggtattagtagcagctaaaaaatattgagggccaggcacagtggctcatgcctatcacccaaggctttgggaggttgaatcaggaggatcacttgaagccaggagttcaagatcagcctgggcaacatagcaagaccctgtctgtacaaaaaactaaaattaaaaaaattagccagttgtggtcgtgtgcacctgtactctcagcctacttgggaggctgaggaaggaggattgcttcagccccgggatttaagtttgcagtgagctatgattatgccactgtactctagtctgggctacagagggagaccctgtattaaaaaaaagaagaaagtattaagcatatactatgttctaagcacatattaactcatttaatacatacacagacatacatgcacacacactcccactgtaccatgtgctattattattcttatttcacagatcaaaaaatgagcaaatatgtgtgcaaaagtatgtgtgtgtgtatgtgagtgtatgtgtagttttaggtaaaagaataaaagatatcctaattgtcgttgactgatacagaattttttaggctataattagtattcttgtgctgtgctgattaagacttttatcagttcttgggctaaatataaatatttatactccttttttgttggcaggttttaatagttaaagatagattcgtggagagggtagaagatgaatagcaaacaattgatggagtcttctaaagtttaacattaatgattaaacaacatgatctgatgacttactcagcaactcaaagacaataaaacataataaatctgtcaattagcattttcatcttctctcccaacagagcttaatggcacctgcaaaatgcaattttcaacccagagctctttgacattttctgtttcctcccatgtccctctcccgttgttcccgttatgactgagagcagcaacgtgttctgctccatggtggcaaatgagtcacctgccattgaaaggaaagcaattattgtgtcctctctaaatctcagggatgacttgggtactacttttccacttaagggcataaacagccaacccaggaccggttttaagtggctgaaccttagcaacagcagctgggctacaggttgatgtcacctgaggtgcccattaaaggtgtggaaagctgccagacaagaatgacttccagtaactacgacttctccctggagggagcacaacgcactgccacacacaaagtgacaaataatgactgcaaagatagcatcttgcctttatcttcctggtccttcggtttgaggacagtgacccaggcatggaggttaggctgtttcttggatgggtttccagctggtgggagtagatgctatttacacaagtgtcaggaattacaattcttcctcttccaggcagctatgtttagctcacatgtgtgtcacacgtgtgtagaccccaacaccaccatctctgaactgtcaagtaaggagattctgggtgatgagaaaaagtgtgccctcagggagacttcagatagtaccttggagctttacatctaatgaggacatctcaattgtttttctaagcttcagagtcaagtgccttgacaaaatgggcccaatataacatttccccttgagtcatttttaaatgcacctttttcttcagtgagctaaagaaaactgccttataaacaccatcaatgtaccaaatgaaagattccattctaaataaatacggcaagcctccattaaccagaatccaacactccaatgcacccagttaaccagaattaggttcactacctcatttttagaatcaaaaaccaatacttaagagcatataataatttcagccaaaaaaaccccacaaaattttcaggtctttttatgcaaccaattatctcaggggtgcattttctatctacctgtttacacagaaaatgagtttttagaataatgattctgaggcaataatcatatagtcaatatatataattattggtatacttgtgcttaagacttgaaagttttagaaaaaatgtccactgtatttgaaaagaaaatttttaaggattctgagattaatgataaagtaaacaaatttatattcacccttacaccttgggcttctagtattccagaaaaaaaaataataataagtgtttcttttaccctgctatttgctctgcttctaggggaggtctggaagctttccttcacctcacagatgggtgacccaaggtgggaggtcaaatgacttgctcagagtgagacagcatgtcaatacccaatgcagggttagacaccagagctgtggactaagcccttcacgggcaaatccatcactgtagaggtatactgcttgaaaccatttttccaaaaggttctctctggagggaaaattctggtctcaagaaatgaaactttgattacccagcaatgggactccttgccagctcttttttgaaataattatgaatctaaaacgtgcccttgtttgctctgaattttcctttaatgtttactggcaggatgaatacaaagcctccacaaattaagtcttcccagaattagttcagaagtgcactttctattactctgactagcagctcctagagtttcataggagattggaagttaattcttttcagagttgctccaggcaaaaaagcaggggatgataatgtttaggtacttttctccctcttttttagataaatcccaggtcctgaagtctgaagaggtcattagtcagcagagggtatgatacatcggaagaggaaaggctacggagtcactgggggctgggtttgaagcctggcttggggcctttaatgcattagcaatgaatgttaatgctctctgctttcttccacgacgaggaaaagccatggccttgacgagctcaacaaatagagtgtggaagtgaagtcacacagaaagactcaacggtcctacctttctacagctactatccacattagccacactctgtcaccttgtcagccaccactgaattactagtagaattgagagtggtgacaatctagcatcttcctacttactttcaacattttccataatcatatataagtccttagagccaatcagactgcattgctgaacaccatgcaagagaaaacttctcaaatctcctttgccaacatttttatatcatattgattttgctcccctacacagtgagggactgcactgggtgttgtgtggaaatgaaagtgattaacacacaaggaaggtgcttgtttcaacagtacaaactggaatgctacagagaagattcggatggccctgtgcaaggatgacacccaagtttgtgaagcactccatatagaagggaaaaaaattaaagacacaagggaggactttgcaacctcctatgtgcatacgcagattgagtagaaggcgctgtgataagggctataggagggactcaatttgctatcagaagaaaaggcaagagaagaaggccgttagtgatccgttgagagatggtttatttcaatggttatgtgtgtggacactggagccatcttgcttggattcaaagcctggctctgtgacttaatggtcgtttgacctagaccaagtctctcagtcactttgtgtctcaggtttctcacctgtaaaatggggataataatgattcctgtttcatagggcttttcagaggatcacgtgaatgaatacatataaagctggcactgtcgtattagacatttcttttgaaagctgaattggaagtgctcacggtggtggtaaagtatctgtcatggagggcatgccatgcgacagatgctagctcgggcacttttatgttcatcatcttatttaattgaaacttcccagcaaatagatattatcacccagattttaaaagctattgatcacgagagttgaatatgttgtctgacatttcataggtggccattggcaaagtggagattcaagaccacgactgtccagctcccaagttcatgctccttctgtccctcagcactacctttgaccatttctccgtatatgcatataaaaagaatttccttttattgagtatatgtagattgggcttggttatcaagctgttctccagtgataactacccccttgaaggaggctgctgcccgttttaacggtggaatcgcagtaatgaagcatgtggagcagcagatgccttgccagaaaataattagcaaaattcctgaattagggtgcccctcacactgctgcagtgcagaaaacagtgaactgattgatgttagatttttttatcttggtaagaaggatcaggtttgctcctttacagcatgtggctgagctgggtctctactgtgaatcaaaaagaatagaaagccaaactcaggtccatttacttgaggtcattcactacctcctataataatgacacacatttgctgagtactaattgtgtgatattcattgtgctaagtgttttgcataaaatgtcttaagtttcacacggcccagtggtgcaagcttgttgtcattcccattgtttaagtgcccaaatctagacacggagcagtaaaataacctgcccaacccttcctggtatccatggaatgtctcagtggtattgggatacaaatgaaggcaatctactttctgagccataatcactgcgttatagtctcttacccctctcactcttaatcaaagcaaaaaaattggcttcaaacaagcaaattgctacacttgacaacagaaatataagccaaatctgaattattagattgctagtaattcttatttgactattaattgggtgctttagctgggctgggtgtaccttttgctttcctttagttggataattgcaagcgaaaattttggatattaccattcatgtacagagagaggtagaagtcagcaattacactaatccccttaatcctttatgtactttacctgcactgtaaaattccttgattttaaatccgccacttgttctataaaaaatgtatagactaaagaaccacaaaaaagttaaataaaaatttttgcctgatgatatattgattgtacatacatatctttacttttgcatattctatgttgccattaaaagatccattaaaagctgagttcaaataattattcactgctcacattactatgataatcaattgcctgttatgaaaattattgccatctttaagaattgctttgctaagtgaagtaattagaactgatattttattttctagttcagttccaaaaattgattttatatgctaatcagagtgtgaaaattgggacataaattttataaacaaaatgaatggctagtcaggcttcctatttgacactttatatagtatttgttgtttctcaaggcatcttgctcttgagaacacactgctgattactgtatctgtcagaactaggtaggataagtttttcattttacagagtctcaagtatctgaagttccaagaattaagaggtgtgggccttcaatcaggacagagggtggaaaatcacaccttctgtccaccgaaatagccattatttcttgcagccccaacagaaaagcagaggaaagacaggtaccatttaccaactgtcttgagtgtgcctggtgttaaactcctgacatatatgttttttctgttccttatggttatctggctaggtaattactattattattactcttacatataaggaagcaaacagactaggaatttaatttgtgatcgcacaccaagtaagcggctaagttgggaatcaatcccagtctgcaggttcacaaggccatgcttttcctttcctttaacaggccaagtgcaaacagctgaagtgaatacacttcagcacaaggctcgagcttcatgatgattttgccctttggcacaaatgtcttggtaaatgtttcaaaagaaagttaatgccttcacttggtttttaggtgatcatgaattgtagaggaagatgcaggaaaccacaggttgaagttgcatttagaagcaaaaacaaacaatattttcatatatattactggaattatgaggtgaaatgaaaggaagaaccaaatttggtaaaataaaacaagatggtagtctcaattccagctccgctaataagaaaatgggaaattttgaatacattccctatctgagtctgaaacagctcatttgtaaaatgaagggttatgctctttaggttaagagtttctcttctggctacacgggtggctgataaagttgatttcatctccaaaagtgacagggagcaggcttctgtttggcagaggtatatccctaccgggtctcactgccacaggaacagaaggggcactcgttaaatactgtcaccctgttttgccctcatgatcctaggtgtctcttagagagacataagtgacatttttataataaataccaaacaacaaacattgtcagatcctttaggggcttggtcatagatcaacagacttcctgtggccatagctagaactcaggcctcttttcaatttgttttctgatcccccactcttcattttatcatcataaagaacccaaattattaatatgccagtaggacaattttaatttttcacatagtacatggactcacactcaacatacctgggtttaaatccagctgctgctattgtgtagctgaacttcttgaacttcctctaaacttttctggccttggagtcctcgttagcttgagatttctcatgtcctttatgctccagattcaggacaacttgagatgcaggcttaaagaagaagtaagtaccaagcttgtgtgctgcattaatgctctgctaaatgtctgtgctatagggatgagttctaatcagactgacatagaaagaatttccctcattattatggggtaaagttcatacattacccccagtactttagaatgggcttatatttggagataggatctttaaagaggtaattatgttcaaatagggtggttagggtgggccctaatccaatatgactggtatccttgtagaagaaaagattaggacattaccagagagagacaagtggatgcacagaaagatgactgtgtgaacacacagcaagaaggtggccatctgaagctaaggagaggggttgcagaggaagccaatcctgcctacatgttgatctcaaccttctatctttcagaattgtaagaaaatgaatttctattctttaagccactcagtctgtggtattttattatggcagccctagcaaacaaatatgctcattataccaataatcaacttccttggatagaatggaccattcttatgatgaatttcatgctgtagcacgggatgcatatgtttaaacaattttgcccctaaagttaataaacactatataatatgggctatactcagatatctaaacattttattccttcaagtacaaacatttgaatcaaacattcaaaaactctagattttaatattagcaaataatagattcttggaatatttaaagagcatgattgaaggataagctgaattatatgggtctattgcattttttttttgttgaaatcaaatatttgaatttcataatttggttaagaaaaaatatagcaagtaccatcacagacatttggtttttaatgctgtgaagcagtggagtgaaattctatctatagagtaatagcaacatgctattctctaaggctcccaacaaatgttcaaagatgtagagttcctatataaacataccaattctaaatgtacacgaatgattctgtcattgcattctaattcttagtaacagaatgtagtaagtaagcattcagagcctaaggtctttactcacatactaggaacctgaatcatgcacccccatcttatagtgcagctttcattctgaaagattaaatcctattgcaccatcattaatcaattcttctcatagcattccagcaaaaataatacaatgagtatcaggttcttttttggtacataagaagacaggcatagctgatttgctaaggcaggaggcctgttatatggtgttatcaagactaaaactaccaagtgttttctgttttagtccgaaaagatttattttctctttccaagagaatgtgctatgacatatatgctttctttaaaatacaaggccatggccaggcatggtggctgacgcctgtaatcctagcactttgggaggtcgaggcaggcagatcacttgaggtcagaagtttgagaccagcctgggcaacatggtgaaaccctatctctccaaaaaaaacaaaaacaaaaacaaaaattatctgggcgtggtggtggtcacctgtaatcccagatactcgggaggctgaggcaggagaattgcttgaacctgggaggttgaggctgcagtgagccaagatcttgccactgcactgcagcctatgtgacagagtgagactccatctcaaaaaacataaaaataaaaataaaatacaaggtcactttcccatttctatgatcctgccttataatcagttatgtgcagggaaaaatcaaagaaatttcaacagaattaatataatctaaattattgagaatttatcaattttccttgtttctcctttcttatgtctcttagcaatagagagaaatgagaagttgtgtaccttttaaaaaataaatgtgtcagaagaaagaatctcctagaaataatgagaagtttatggaactttttctcttttgatctttaaaaagaacacaaggccaagtcactggggaaaaaaaaaaattctatgaaacaggtcccctgggctgtgaatccatggccccaggctatttgtaataaagcatataaagtgtataggttgctctggtctttgaaggtctttcaaagatgaaataattccatgacttttgacatttgagaatctttatgggtgtgaaagggacctaattgaacaagtgggctaagctgccaggaacagagatggagtagccatattttaaccaagcattgtaatatggtcaatggcagccattaatttatttctgccaagacagatggccttctccttgataccaatggggaaaaaataattaagaaaatctagagccagaatggaaaagatagctgtcttttgacaaggtgattcttcagtttgcaattaacaactgataaaatgctatgcatgttaactttggggaagaatagctagtcatttgaaatactaatctcactttcttttcaaactaccttttactggtatctgccctttctgtcccatcctgtaagtaggccatacattttatggaaaacaatttaaaagaacatcagtagatatcagctataattctagaaacctttgtgcggtctttggttttacatatatggtttcagaagcaaatccaatgggcattgttaagagtcacatggtttagcttccgggtgttagaaagcaaacttccactcttgtgccctacagacactctcttcactggagttctcaaaatatatgatccctggccagcaaattattatgtttttaaaattatactagctgccatacatatcaaggatggcttttcatggggcaaaacggaatcatttaagaattacatcagatcacagcagtagcaagttattcacaactaccttgagctgactagcaatttttttgtagcttggaggtaaatgactttttgttgaaattgaggataataaattctagctctcattttagtaatgaaaagcagctcttcgtctcctcatcttcaagaatgtgcagagaactaatctcccctcaaaggtcctttcctctggccagactaagttttaccaaaagaacacatggtatttcaaacattggaagacttagccttcttttcttcctcctctctttccattccacaaatatttattaagacttcattttgccttaagttggatcctctgtaattgccataatattctattattttgacttacaacagtggctctggataccccctgacaatgcataagaaagaggagacgagtaagatacacaatctgtctgtaaagatcttataaacaagttgacaagccaagaatgaggtaatgaatgccctataacaataatccttgatgcacctaacttgggtggcattaaataataaaggtaataagagttcagagatggcaaaaatccctagtacaagagtaagcagtgatttctttttgaatgaagagatgaatataaatcttaaaagtacatttggaaaacaagacattgtatcactgaagcattctgtttcttatgcttattgcacctgtgttttcttcctcatctcagcagccagctcacatcctcagaagttatattgtttccacacttctcatgcaacactgcaaaaatggttttacttaggtactattctagtcacctgcttcatacaagccactctagctgttcatacatcttttcaatcagattataatatttacctatgacattttttaaccattgtcaattccattaattctatttacctgtgaatgaaatcactaagaccattagatcaaatggattccttgttatctcctacaaccacattcttttaccccatggaaaaaaaaacacttattaaagtatatatacagctataaatatgtcagaatatagcaacataaaaatgaccaactgggtcagacacagcacctatctttgacttgtcattctggaagtgagcagatttttttttttttttgtacccacacacctgaagatcatgactaattcccctcattaacaagaactccttcaggcaatgtttctaagggggataaggtggagtgggctctcttgcttagaggaatataggatgctccactgggaagagaaatacataattcaaagaagaccttcaggtaattttgatattttattcactccatcttcaggtccacaccacagaaaattattactctactgtacatatttcttcttgatatcaagctcagtgagtaccaaaatatgttctcttatcaatctgttatctgagaatgtatctatataatttaaggttatccatatttcataatactggtgttcaaatgtcctcccaaatttgccagctgttaagtaaagtagcacagcacccatgacacttaaccatgctagattatccatctttgtacccgtatctctccacccacattgtcaactcctatctttcctgtctttacatttccagcacctgggacagagcctggactttaaagttatatagaaccacattaaattgccattttttgccacttaactgtggttgcatagtagcaatttcataaggttcaacctaataattgtaagccatgactaatgaatagaattttaaaaaggatctaaacattcttttttttttgagacggagtctcactctgttacccaggctggagtgcagcggtgcgatctcgacttactgcaagctcagcctcccgggttcacgccattctcctgcttcagcctccagagtagctgggactacaggtgcccgccaccatgcccagctaatttttttgtatttttagtagagatggggtttcaccatgttagccaggatggtctcgatctcctgacctcgtgatccgcccgcctcggcctcccaaagtgggatctaaacattctttagggcttcagggaaaggaaatgggggaggggagggaactaagatttactgagattttgatgcagtaggtctgggatgggacccaggaagcagcattttaactagtattgcagatgatcttatgcagatgacccacggaccatgttgtgacaaatgatgcctttagggacacaaagggataggataagcttctggtcagttagaaggcagcaggagacaaggctactcccaactcctccttttcatgcaaatcatcttcatcccatccagagtaggctgtgtgagccagagtcagagaggcctgggcagtttgcatggctgtccttagcaggtcttatactagtatgctttttttccagaggtattttgttctttggaaagtccctagcatctttgtgcctaccaattaacaataccccctccagccaccatctgcactgtgtatatgcaaggtggagtcattcagctcttgcattcccaagtaatcctcttttaggaaaagggttctctaatgtgctcagagacaaaagcacccagaggtcactgtgttctttgttcaagtggctgcaatgtctgaaaacacaagggacttcttgacagatttcacagtgttgtgattaattagtgcccacacttgacaggctaggaggacaccagaatgatccctgcaggatggtgcaacatctctccatgtcacagcagtgagggacaggtgaatgatgatttctacaactagatgggaggtagtgtagagtgggctgcaggctcgtcagatctcaacttgcttgatcccaccttctaaggtatactaaaggtgaaggcttattcattgaaaatcagagacacaaatcctccaaggcaatgcatcacagattgtgtggtacactgatggacatgctgtgttaatgactgcatttgttacagtttgcacagtgcatcctgctaggcagtgctcataagggacagcacattaaacttatcatgttatgtcactgaacatatcatgcaatgtgatgtagtatcagcatactattcattgcatatgtttcccagggtttccagattaatagctatcttgaagaatataaaaaaaattcataggtttaatatacacatatacatgaaggtaagaaacatgttagtagcaaaaaatgacaaatagattacctacaaaaagaaacacatgtatctgcacatgtttaaaaaaaaaaagaataaaacctgtgctcagagcagaggattatcacagaggccagtagtataaggcaaatataaaagggcaaaaattaaaaaaaaattctactcttcaaaaaattttattttttatgtctaaaactgagatgggactatcaaaatctgaatttcatccatccatgcatccatccatccattcaaccatccatttaccacccaatacatattgattgaatgcaaactatgtccagatactgccatagacaggatgtaatcatatgtaaaggacatcccaagttccctgtactcacggaggttaaattctactgtgggagtcagacccaaacatacaagtttaaatctgaattcacgtcgccataagcagtggtataaatgttgaacaagcttgggagtcggaaggatgtgatttgtagcttttgccatagtgtaagtgcacccatcctggacaatttcagtctaacaatgtgatgtcaccggatgaggagttggaaagagatgtgtacagttaactctctggagcagtatgagccagccccagctcacccttgaatgtgatgtgaagaagcaaagttgggtaaggggccagagactgcggggaatggtggatcttttaggcaggtgtcagtcattctttgattagtgacatttgaacagagacctgaataaagagaaaagaagtaataaaaatatggccagtcacagcggctcatgcctgtaatcccagcactttgggaggccaaggtgggtggaatgcttgaggtcaggcattcgagaccagcctgaccaacatggtgaaacccctgtctctactaaaaatacaaaaattagctaggcagtagtagcgtgcctgtaattccagctacccagaaggctgaggcgggagaattttttgaacctgggaggcagaagttgtagtgagctgagattgcaccactgcactccagcctgggcgacaaagtgaaactttgtctcaaaaaaaaaaaaaaaagggtaataaaaacgcgaggcagggagttgaagatagtgggggagaagagtgagcacaaaggcagcaccgagcacagaggaagcactgcactgcagcaaaggtactctctgcaaaagggaaaacaggatgaccagtcaggagtggtttgtattcatctaggcaagaagtgcaaatcgctggacgcagagtggtagaagtagaagtgatgtgaaatgcttagatttgggatacatttgtgaggtagacttacttgaagtcaccaatggattggatgtgaagagggtaactgaggagtcaaaggcaatctcgagaaagactcttagttagcttttgctgataatatataccaccattagatgcaatggggaagaccaaggcaaaagtttgtgtagaggaaaaatcaaaagctctgtttgggtcattttaggttagaattattgacagacatgtggagatgtcaagcaggtagcgggatatgcaaaagtctaaaggtcagaggaagtcagggatgaagatatatgaagatatgaatttggaagtcatccaaatatcgatttcagtgactatgccctcagtgcgtcatttgagaaccaatgccttagagaataatgacagagattcagcctttaaggggcccctggggaggaggcaaccttttatagaaagaggtgtgaatcattgccccaaaatatctcctgttaagctctccctatttctgaaggtacagcctttaaaagataacccattttcaccacccgggaaatgaggagcacctctgcccagccgccccattgtctgggaagtgaggagcgcctttgcccagctgctgtgcaaccctccaagtgtgaagtgacagccttgtgtgtgatctttctgccctccccaagtttgcgtttttgacattaaagtttacttttaaattaaaaaaaaaagatactccattttcatcatagtcctgttaaaatccatgttaatacttactaacaaactaatagagatttcccacctgtcaacttgactagagaactgggtatttgatgttcagaatatggagcaatggttcttaaccctcggtacacattataatcaccaagtagagttgaaatatgctgacacctgaggcccatcccaatgattctagtttaattgttgtgcagtggtgaaaagtatggatttcttttaaggtgtaaactggacaagggacaggaaaggtggtgatggaaccaaagagctgaaggtctcaataatgttgaggatacttgccaaatcctctagtaagagaggagttgtgatctgcttgtggggtgatttcattgtgactttgtaggtggttcaagatgtaatatgggagtggagatggagtaacgcaaaagatcactggggataaaggaagtgcagttactgaaggccagggtgttgggaaattcctaggaggtttggggtatgaggtatgatagcaggcacagagatggaagatgactgagccaaagaaccaggagtcaaagtcttcaatgactgaggagactagaagaacaattatttgaggacagcaagaagcagcagcaggaagtgtttattcaggactgaacctgaaagtttcatatccaatcaatgagagacttctggtaggtttccctatcaattatattctaaatctgacaatttctcatcacttccaccactccaccccactctaagcaacgtttgcctcttacctaaccatggagaaggaataaaatgacccaaatatggtagtagaaagcagggacaatacaaccctcaaatccaagccatgaatttgcaggaatccaaagaagtgagcaaaaacacatctatttgaaagggctgcagggatgcaaaatcctcagaatggggtctatatgcagggaaggctattaagtggtatattccaagaagaggagagattgatgatgacagactgtgaatttgaaaggattttcagaggatgagaggggatgagaaattgggccacatacgagtttgctgagacgtgtgagattaagagatttgggtactaatggatttccagcgctgcttaaatttctggtgttagctaagggaaaacatgttagaaaagatgtgattagtctcatagcctcttagagaacagtcctagggtgatggtctgaaatattctaattagccatatggcagcttccagggctgcgggcccctcacagagcatgtgttcgcaaagtggcccacgcaaggagcactgggtgatatggtcatcggactgggccatggccctcacgaaatacaaggatgagaacttgtgaataaatgtgtgcaaccaagcttcatccatggatggcgatgcaacaggagggccacttgccagtagagtgggaatcaccctggtatgcattactgagtaacacatccagttaatgacactcagcaacagcttgctcagcagaagacttgagtcattttaacaaatagaaggctgggtgaatttctgtgagctctgacaagtacaaactgttttcttagactcgttgaggactgagtgttgtagttgcctcatcactgtggtgggccctgccctgaaaatgaacatgcttactgcaccaaaggttgacagccacctgtgaaatataaaacaaccttactccctgatttgtgaaattatttatgttaaaagttctacaaagctatgtacatagagataaggctggaaggaaatactcctaaacgtagtaatgttacggataatgtatttttttctctttattctttttggtgcttttctcaactttctactataaggtcataaaactttcaaaattgtgtggggggagttaattataaagtataaatattcagccgggcacggtggctcacacctgtaatcccagcactttgggaggccaaggcgggcagatcacctgaggttggaagttcgagatcagcctgacccacatggagaaaccccatctctactaaaagtacaaaattagccaggcatggtggcacattcctttaatcccagctactcaggaggctgaggcaggaaaattgcttgaacccaggaggcggaggctgtggtgagccaagattatgccattgcattctagcctgggcaacaggagtgaaactccatctcaaaaaaataaaataaattaaaataattaatataatataatataatataataaagtataaatattctacaatggcattgaaaaggaaatctgggctgtcctaagccatccatgttgtctggctgctgtcctctccctccctgtccccctttcattctggcctcccctctgacctgtatgtgtattgggcccctctgggagaattcaccaattcttagcaagtgcctttccctgaaaattgctttctgacctacaaggctgggcccacagcatgcacatgtcatggcatagctctgccttctgaccaaatcagctaaaccagaagatagagtccttctttggtaattttaatttatcacagagattataattgggtttaaaatatgttcttgaaccaaagtgacaaaccttgagctctgtggcagctaccttctgcgatggggcaggagacacagaaaactggcttgcagaagggacaggatgaaatttagcaggcagagagaaaagggatgtggcacagggatagcattctacctatgaggatccctgtttttagacttctcagagatctgccattaccgcaatatgcttacaccacttgctgagtgtctgccgctcaagttagctcctctcactttaaactagaaagttcctgtctctcatcccttctctccctccttccattgctgaattaaaaatttaaaaattctttaatgaagtaaaaactcattcaagtttcaaacaagtgatcttcagaatataaccacttaataagcagggagcaattcaatacgtctgtgtgtgtagttttatttggggagtagagtttagaaatcattccaatattatacatcactatgcatttgttttactcatgtatctactgtgacaaaaacacaaaaactgcatttttggggtgggagtagtttttggaaactatgaagaataaagttacagccctactatagccaacatcaccatgttttcacatccccaaaggccctactacccacactgtggcccccattagcccacacgtcatactacaatttatatgctattgatcatgagaaatgcaggcccaaaaactaccttgaagcaaaaaaaataaaaataaaaaatctttttctcttgactccccccttctccatgctataaaatatattgcagacaacattttcctgctgatggttaataagtgaaggacaattcaatatccagtaaaggtgatttattttatcaagactgtgacctgctgcccagctgggaaggatttacaagaaataagaagacacatgacaaagaaaagctgaagtttagaaaattcccaaagacataaagcaaataaggaaaataagtaaataccaaaatatttcttcttagaggtcttccaatactggtgtgttctctcttatgctgagtaatgtaaaatatgtccttccaaatataactctcaagcactttttttcccaaaagcagcttactttgagcacacaaccctctctatcttacactccttaacaatctaaaaatgctgtgtcaaatcttttcactgttttttctctgcccacaaaaagaggatattttgatcatttttaggcagtaaattcaaggcctatattcccccattctgtagcatttggcttaggggaatcactatcttgtttccctagaagacagaacataaggtgagtgaatttgccttttccagccactaccctggctgccctaggaagaagagagtttccagttaacgggaggaaaactgcacattagaaaaggctgccacagtgggcctgacttctgctccgcacagcagcacacacctggttcatactcagcctctccttctcccacttgcctgactgcctgtgttcctggatcaagtggcaagtttgcagtcttccttgaattcccccagcactgtcttcctcgacggcacttgacaaagcggagaaatgaatattctgcttcctaatgagaatacacagttttaaaacatcttctccttccctagcactgtgagttggtgccattagcttgtcatgcttgttttttgtttgttcatttatcatggaaactcatttcttccactttgaaaccattaggttcacatgtttggcattttacagatcctcttggcagaacctcttgggaagcacaaagaaataagtccagagtagcccattagttttatgtcttaaatatctcttcaaacagttcacttccttccaatgcctccatactattgtaccctcaactctagcctggtctatagaactatcctcttctctgaattctgtgtttctggctggcctatctcttatctactttcagcaaccagggtaaacttaattatatttttttaaattttaaaataattttaggctcacaagaagttgtcaaatcatggcagagatttccgtgtacctttcacatagctttccccatgataatattctacataaccacatgcataacattcaggaaatggatattagtccaatcctatcaactaaactcagagtgatcctataaaaatgcaaacctggctgggagtggtggttcatgcaaacctggctgggagtgatggttcatgcctatggttccagaactttgggagcctgaggtgagaggatcacctgagcccaggagtttgagataagtgtgggcaacatagtgagatcccatctctacaaaaaagcttaaaagttagctgggtgtggtgacacacaactgtaatcctagttactcaggaagctgaggtgggaggatcacttggacccaggattttgaggttaaagtaagctatgatggtaccatcacattccagcctgatcaacaaagaaagaccctgtctctaaaaaagaaatgaaaatatataaataaatagatatgaaacctgaccataacacccctcccctactttgctaaaatgtattatagcttcccatcactcttagaataaggaccaaaatccttaatctggtccacaaatagtctgaccagcactttggtttggccaagacagttctgtttcccacccgctgtcccaatgaattatcccattttacatgtcagcaccctcaaaattgtggtagtttagataataaattatggtcatcccacagtgagctctggatggtctggtcctgcctacacagacctgtggcttttgttttacacctgtccccttctcggtctgagcccctgtgacacagacccccttttagtcctcaggatgggaggaggatgcataaaagccacaagacctttgcacatgttgttgtctccgcttggagtgaatactatttcttcccccttcacaccctctccctctctctccttcccccttcacctgtcagctcctacttgtcttagctcagagaaatcttccacagactagatcacatctctctattaaatgccctcaaacaccctgagccacatctttgaattgcttattacagttgtaatttgacatctgtgtctatacatgaagagtgagctaaaagaaggtaaggcggagtatttgtgtttgtagaacatcacatccccggagccagcatgaagctggtggacaattactttatagttatcgactgaatggatgacagcttagttgatgggttcataaacaacaaaagcaaattggttaatagcttcaggaaaaaggaaaaaaaaaataaaaaccactcacagggttttctctgcagactggtacccctatggcccatttaatgatttaaaaaccaagctttggaatgagacgggcccaagtgtgaaacttggtacttgtaaactgaggacatttatgccagtaatataacttctttgagccttaatttttttcatctgtaaatagtagtggtaggagtaatggtaatagtgttaataataaagtcatctactctataaaagtcttatgagggttgaatgagaaaatgtaccgtgcttaacacacacatcattaggtaagtgttagctcttattactatttggctaaaggtgtttcaaagacatcatttcctctgtgtctaagatgatttccttgtttcctaaaagacacacaaggaggaggtaatgctcttcacctggcatggctctctcctcacctgtgcccccaccccaggacttccccatcctcctgtgctatcctccttgcagcaatccaggccaaacctgggcacctgccagaccactctctctcatgccacacattggatctcaggaaagcatgtctgctttctcctcaaaatatattcagtatcccaccactccccaccaccccataatcaccacctccaactgccagcttattgcaacagcttccaagtgggcctctcttctctagcctttgtccttcagaatatcctcaagagggcagccaaaatgatgctgttaaaatgtaagtcacatcatgccattcccttcctcaagcccttccaaggttttccattttctatgaaaaaaaatgcaactggcctctggaggggtgacaggacctgcaacctgcctcctatcttggatcccccatagctcgtcacctctctccttcaggtattccctcaatggagaccctgtcaccatcacccatttaaaacctaaataaccaacaaccttcacactctgtatccccctccctgttttatttctccataactttcattaccttctatacattttcgttatattcttgatagcccaactccctgactagaatggaagccccatgagggcagggatttttgtctgttctgtccttgctgttcctctagcatctgacactgtgcctgacatgcataagttgctcaataaatacatcttgaatgaatacacaaaagaataaattaatgcacaaatgcaggaggcatcattgctctcagggcaagagctgtcctccacatacaatttgggatacgttatgaggcatagagaagaggtctgaaggcctttctagagtgtgttgggtagaggcaggggaagaggagaaagaattagctggggtgggctatctcttagcctcctgaaggctaaacagacttgaccctgacattagacttgctgagtggctgagtgtagtggaggcatggggatgggtggactgagggctgagcaggtacaagagagcatgtgttcacattcagagaatgctctgcccaggtgggcctgccagacagagatttatgtggactgccaaaactcagggaaacatctgctggagaagactctggccagaaatcccactggcctgagggctaacatgaggcacttttagtactagccaagctcatttcccattgtcaatttgaatgaaatttccagaacatgtactggctcaggatacattgtccagatgttggcaaaataaaagccaaaaaggaatatttaaagtcggctgcttctcttgtgactccacagctcttttgccaaacatgcaagcttgtcttgttagaagctgaagcctgagccaaggtcttgggtggacaggacttgaaggaaactttgggccatattcaaacaatcttggactgagtagtggtcactaaattctccattagaatacagctattcacaaactcaagggaagtgaactgcgaagcaaaaactcagagcattagtattgggactttgtaaaatcagcctgcaaatctgaggaaccaaccatgctagtgtcaccaaaaggcatgaaggacatgtgggaggaagtaatgggattatcacctactatctgagacagaaggcatttttggagtctttaagactagaaggtaccttagagaccctctgctcccagttttccatatctatctctaccctggacttctgagctcagtcctctataaaagttggccagagacggtaacatcagggcatttgctgaatattgaagtcacatcaacctgacttctcctcaatttgatatagacaggagacagggaaatgctgggtagaagagggtggttcccagcaaaagccccaccttcaagcatggagacccatggccctaagtgggaacaggcatttgtttttgtacccaaaaagttgccttttggcctgagacacacccctatcctgtcacataaactgcaaaccccaggctccagaagcagatgaggtggtgagaaaagcagaagaacagtggaatgagacagcaaagaaagagagaagaggaacatctcaacaatgagaggctcagctggggatagtcagaaaggagttcagccactggacagtcaaactcctggggaagatcatcttccgactccatccccacttccagctccccatccatcccactaagagctacctccaccactcagtaaaacccctatccatccttcaagacctgcttcttccaggatgctggacaagagctcaggatacacaaagctgtcacactggccctctatccctgcaaaaaggcaaagggtccattgaggtggttaacactcaagccatctgtgaatggcaggctaaaagagcacactgtaacacacagctacttgggctcctgcacctgtctgcatgtttcccctcccctcaggggtttgggcagtgaggtgacagaacaggaaagccacagccctgtcacacatctcccatttcaaattcttctcccctatatgcattatataatacttaactcaatcttcttctttagagacaaacttcctttcctatctctggtagattagttctcttttttttttttcctttttctttcccttttctctctttcctttttttttttgagacagggtctctctatgtcacccaggctggacttgaactcctgggctctagcaaaccttccacctcagcctcccagtagatggggcaacaggcatgcaccaccatgcctggctcagttctctttttgattcttgcctacagggttccctgttgttatcattacatatcatgttgggttaaggaacaaaatccccatcaggcttggcctgggggattcttagcagttggtctgacacatcacccaatagataagaaggttctaaaggagggaattaaattgtctaacatcacccaacttattaacgatagaagcaatttcacagctcaaaccctctgattcttaacagaatacctctaccaaaattatgaggataggtaaaatatatttacttctattttttctagtttgtgcacaggactataaataacttctaatacattaagacattaaagttatacaggaagcatcccaaaatcttagaaaataatgcttggtcaatagagcgccaaatgcacataagacacacaaaaagacattctaaagaggatgctaaaattaccagaatcattaactagatatattctgagtttctatataatgtcatcatcttagctgaaaaataaaacaattccaggtggttaatatggtgtggaataaaatatttacactttttaacatttgtatttaaaatactcatttgaggccttcacatagaatcaaaaatagaaatttaatggttcattgacctttatatttataacttctaaaattctggataagagaatacagatattttatccaaatgaaatcgtaatctttttgtagcttaagttttctctggcttggtttggtaacagcctgttactttacatgagtgattataagcctatcttaaactgtagccattgccctaaagaaaatgtttatggcctgactgggataattgtattctcctattaaatatcactccttcagggctagttactgttgagtataaatgtgccactttatatgcaaataaaatgtcctgagatttgaataaaaagttctgcatatacctactgacaaatcaacttattatgattcatatcagcaaacagaacttctcaagatataagatgctaatattacatacaacaagagacagttctttccttgaattttgttttcaaaatgttcagatacagctggaaatgtctttactcatagatatagcagattttgggtttgcattctgagtttcatttttagtcaaaagatcttacggtattgtgattacttattgccaaccttttttttttctttttgtatattttagtctgaccttgatttgtcttcagtccttttcccatatacccacatacctgggaaaaatcaactttttctcagatactctagcgcaaaggccaactcaaagttcagcttttccaagaagccttcttaaattcgacctaggaaagcatagtttcctcaaaccttgcgtgtggagtataatcacctcacatatttgcattttctttttatttttttaacctatcatctctgaatttgatctttgagcaaaagtaccctcaggaaaactatcattttgctgttcacatttgaaggagcagtgtttttgttttctgtttttttttgagacagggtctccatctgtcgcgcaggctggagtgcagcggcgtgatcatgtctcaccgaaacctcagccataaggcttcagagatcctcttgcttcagcctccggagtagctgggattacaggcatgcaccaccatgcctggctaacttgtggatttttgatagagatggggttttgccatgttgcccaggctagtcaagagctcctggactcaagcaatccaaccatctcagcctcccaaagtgctgggattacaggcatgagccacctcgcccaactagaagcagtgttcttatatctcaaatcccatctcagacctgtgccttgtgtttttaacaacctctcaggggtactgtgcaacaactcttcagaaaagcaaagcaaaacatattatgtgtattggggccctgtctgtgcagagatagtaatatgagataaacatggatgatttaagggagaaactatataaagcatttaatccccattttctccactttccctacagctctgctgtccttgcctggagctgtcagaggaaaatgggagaattcaatggcatgatgttgaaaactgaactctgattttctggccaatccatctacttccctagagttaaaggattcataggtgaatgggagctgcaggaccgtaggaaaggacatctttgggttatatcaccaaatcaacacaatattgcatgtttgggaagttcattgcttttgttgaaactttgagaaagcccaatacccaacaagaagaaagtcattcactcaggagttaaagctaaatacttacactttttgagaaatacctaaaattttatgattggggtctattgtacttcttaattagaatttagggctaacaagagatattataacatcaatacttgcattatatagaggaggcctttaaactactgtctagggaattcagagagccatgttcctttacaacattccttctcgtgcaattcaaagacaattgatagctagaaaatgtcaaggaaccaagattcttgaccaacttgaaaagcaagacttggataaatggcattatgagatatatttgcactaattgtttcaatttgactgaagtatgtcatctctgctagattgtaatttccacaagggtgaggctcatgtctgcatatcaccccttatttatactcagaagggtccctattacctagtgggccctcaaaaatatttgatggatcatggaataataaattaatgcatgcttgcccgaccctaaatattgttctatttcttgtagattcttccaaaattatagtcactcaatacttattcctattagttgggtcacacacatacacagacacacacacacacacacacacacacacacacacacacacatacacagaggctaatgtgaatatagggtctttccttatagcctttaaaatagaataaattcttatgtgcatttaataacttagattttctgcttgaaagcaaataaatggagtaaatcagtcccaaaaattagaataatttctgtaatacaaaattaaaccaatttaattaacattttaatgttaacaggacacagctaagatcacccttagaataatgaatctatgtaaagatcttcatggatagaaaaggtacaaatgggtttgcatgaagcttgtacctacctctgatatttgggacaaaagagatgggtcactagaaaggtttctgctttagaaatgacctccttatcaatctccttgtttttaatcttgccctataaattccattcttcaaaatgaagtcagagtatctgttattatctcaaatgtagcttccttgcttaaaacacttcagtacttcagtagtcctattgtcttagagcaaatttttggggtcatttcactggcataaaaggcctgacctaaactgtgttcctttctacagatagaatttcatttcatatcactcattgccttgagctatgtgctgtggtaataccaaagaactggtgattaccttgctgaatacgttgcattaattcaagcctctgtacttgtgctcacactatttccttttcctggggtgttgtcctcacctgtcttccccttgtgactccttctcccattaagacttatcaagtctcctctaggaggtatttaaaatggccttctgctatggtccaatataagtctgcatacattttattatttgctgcattacattgaaattaaccagttacgtatctgtttcttactctagactctaagtattcccattacacctctttatggttatctttatggttctagctcccattttgaaatcagttattatcccaataaaatcaataagtgttgaaccaggctgagtgcagtggctcacacccgtaatctcagtgggagtttgggaggccaaggcaagacaatcgcttgagggcaggagtttgagaacagcctggccaacatagtgagaccacatctctaacaacaataacaacaaaaagccagggtatggtggtacatgcctatagtcctagctactcagtgctgatatgggagatcacttgagctcaggacttcaaaactgcagtgagctataatcacgccctgtgccccagcctggacaacagagcaagaccctgtctcttgaaaaaatgtgttgaaccgcactgagtatataacattatcttgttcttttgcccatctccatcatttcaatgttctgttgtggcctgggagtttccagaaagtaacattctcttttcttatgtgaattgctgaactaaactactaatattcttcagaattatagagtagtaacactataaatggctgttaacaaaagccatatggctaacactgacctgttactaaataagagtatattgaggactcaggtgggaaaaatattcaagaattagttagcttcatgtgctaatatttataagaaataattacattgcaagaaacgtgttaaagcatctcagttatgtttagtagtaactaaacttgacactatttgcatatttggagtacttctactgttttttcaacttaagagctcaagcaagttttatacattcataaaaaattataaaatcatttctttatttcaattttcaaggccaacgtattgtgtagactttcttataattgttacaaactcagaaaaagaaagatttatgaaagaaacattgacattcctttaacaatggtagttttagcaggcaccttggtattatcagatattgcggctcccagtctccagtttccagataatgcagtgacttaatcagtcctctctgaagtgcaaagcaggcaatcttctttgtcctttgtgcatttctcacgtcttacaactgccccacttcaatattcctgtgtgtcacctaccccacatccgtcttaccctatatcactattctttgtaatttattctgggcttagttttgttactacactgaaatcttatgcataattatgtgaggttgctatggagattttgtgtgatttgtcatgaggaaaacctattgtgtttgagatgattctccatactaatgatcaagaatccatttttttgcccatattttctctgggattataaccaactgcatatatttgaatatctataagcaaaagttattctataaataacataagcagaaaaaagttattgaattcaccattaaagtgaagcactttagtgcaaccagttcaatttctcatgatttagaaagaacttctaatgtaactctttttgaataccagctgaactcttgcctgaatccttttagaagagaccctgaagaagttattctataatcacatctcttaaaattctgtcactaatactatatatttggctatacaataacttgaaaatgtaattttggagaatctgtgaaactattgtgcaaaattaagagaagatatagccaccttattcgaaaatgtttattcataattcttcaattatacagactttttggaggtggaaactgagggcgaaattgattatttggcattagtcaaaggcaattcagactaaagactgtgattgaacaacagaaggtaaatatcacaccatataacaaagtcatgattttatacctctcttgtctgaccgccccaccaccagcctaggatgaggaaaagcatgaaatatcatgagacaatgcacatgaatctctcctttagcccccaggtcagcaaagctaatttcaggatcatgattgatttttagagagaaacattcccaattcaagtaggtagaagtttcccaagcaggcagaagagaattgtgatgaattcggcagcttgtcatcaggaaagtggcatccagaggataaatttagaagttaagaagtgaaatctcaaatcaaaggcagactaattatagaaatgttttctaggcaactatttgtctgaaaacacaactaaattaccaatcatttctggaaagagtgtgtggttttcactcatgataatttgttgccatgggtacccagtgtagaaatctaacaggaacagagatagcaagtaaggagaaggagagagaggggctcagtgagatgctctggaagaggaagatcatagtcagtgtttgcgtgacaaaggactccaattcagtcgactatctggtaagtctggacagcaaaggagtcctttcattgtcttcatgggagccaatgaagtaccctcctcccagaagccgagaatagtctatactggacatgcaagtcagtgtctgaaaagtgtcagagcaggtgatagatcttaagggattattctctatactacaattgattcaaagggagaggagcttctggaaacaatgaatgatcatttagggaggaaaataggagaacacttttgtaagaatataaaaggaaaataatacctgccttaaaaggctggtgagtagaagatcatggctaatcaaattagagtggagaaggaatttagcttcagcaactggaaccaatacatggtttgaaagtcttcccattaaaaaaaaaaaaaagtactagcatatagggaagactcacatgataggtgcaagaaatcaatgggcagacccaagcaggagacaaggacctatgctggtgactggagaatcttactgaggtctttagaggaagtcatgggctcctaccacagggttaaccaaaggttgtggcttttctaagagaatgcatcagagatgagaggaggagcttcaccagcccacaaccaatgtaccctacttctaattcagagaaacttgtagtgagatctccagtggctttggaattctgcatagaaagctagagaatgtgagcgcctaagtagccatgtccagttgaagaacaggtaaaagggaaaggagggcaatttggagaggaagaagatgtcaaagtattaggttgtcttgatcaatattccttaagcagagctgcaaagatagatcctcagggatttcctcaagacccaaagtcctattttcatggtttcacaaagtctcaataaatatctttaaactcttaatctcatttcagtggcattaaaataaatactaagcatattctaaatgtattagtgaacaacttttgactgaatactgccatgtggtccagtgttctttgcacttttatttatgatgctcttgttaaaagtgaagaaaacggacgtgagcttaatggacaaatggaatattcctgccacaagaaaaggccaaaatgatataatcccatgttaaactaacagtttgtagcttgatgggttgaacattggaaagacaattgggttgtcatccattacaagagtctacaggacagccaaactcagaagaacctgctcctagtggaaaagaccattaacaaatatgcaaattgcaaataagtctagcaaatgtcttagcaaaatagcaccatctgttatattaaatccagttcatatatttgatttctattggttttatagttttgaatttataaatttattttgattctgcacttaagaaagaactataagcataaagagtgtatggtaagaagaaaaataatcaaggaattgagagaagcataaatctgtttaaaaaatgaaaaaaaaaacagtgtaaaaaagtctagagtatgctgtggcttacaaatactgatgacatctatagggagtgttaggttaaggctgtgtttcgagccatatgagaacaaggatgggattgtcttattgcttgaagccgatgatgtaatgctaatagaagccagagagaaagcagaaccattcaacttctatattgcttccacctttgctatcaagacaaacgatcaccgtgttgaaaagaagaggaaaacatgaagcccaagacaagtgaggagatcccaagggagatcagcaaactgctttgcataaatccaagtctcagcaataaatgacaccctggggtaatgaaaggacttcagctgagactgtggaagtttgctggcaaactctggggaatcatgatgagtcagaggggccccatattaagaacagaaaaatgtgtttgtttgtttttagaacatgtcaggagtttttaatttttaaaatcaaaagaaaaagctgcatttagaagttacaagtcagtttttagtctggttatcatgttccctcaaaaatatttctagaatgcaatgttttaaaagagagtgtatgaccatctagaaaagaaatcaatggtcactaggagttacaggggcttcctaagataaactcccattcatatctttttggataaaggtaacaagactgagaggcaaagtgaatctggattgcagccagatatgtaatcatgtatttctttgttgttgttgttgttgttgttgagacagaatcttgctctgtcgcccaggctggagtgcagtggcgtgatctcagctcactgcaagctctgtctcccgggttcacaccattctcctgcctcagcctcccgagtagctgggactataggtgcccgccaccatgccaggctagttttttcgttttttgtttttttttttcggtagagatggggtttcaccgtgtcagccaggatggtctcgatctcctgaccctgtgatccgcccgcctcggcctcccaagatgctgggattacaggcgtgagccaccgtgcccagccataatcacgtatttcttgataaccaagaagcaggctatagaagtggggactagatgatcattttgtgaggtaaaattgaggaggtacaaggtggttgttctctgcctaacaactgtgctgaaatagtatatcatgaaaagcctgggcttcaagtcagaaatctgagtaactctttaccactgactagttcggtggtcccacaaatctaacccactgcccatttttgtaaataaatgttggaatacagccacacacaatttttttttttacctattgtctgtggctgcatttgtcattcagtggcaaagttaagtaagtagttgcaaaagagatcatgtggcacacaaagctaagatatttactatcagcctatttacaaaaagagtttgtcaattccctgactagttacataaacaactaggatgtttcataactttacttatactcattttcatcatcgacattaatctacattaacagaaattgattactatagcatagtgcttcaaaggcatctaatgaaataatgtatgggaaagctccttatggattgtagtgtgttgtacagagataaggcatgtcttatgatcactctggctactgaaagattaatagcaatattttcatgttaaagacatgccaatctccggtacaaagaagactctcaaaaatactagatggacttttggatgaatggatagatgggtggatggatgaatgaatgaatgacagtagtaattatacctcgcttatcactggctatgtaacagggacacatactgttttacatgtattaccttgtttaactgttgtaacagacttgtaacattatttacattttgcttctgagtaaaagagatttaaacaatggcaacatcatcagaagcaataacaaatatttatacaggacttatgacatttagccactgtgataactacttaccaaatattatttcatttaatccctcaattacctcatgaagtaggtgttggtatcatcatcatcatcatcatcatcgtcatcatctaatcatcattattattccatctttattgatgagaaaatagaggttcaggaaaactaacagacttcccaaaatcaggcatctggtaagtggcagagctggaattcaaaaccttgtctgcttgactctgagcttttaaccatcagacactgagacaatggatttgcattgacatgactcaattttctaaagataaatgtaatgtcttattgaaataattaaatattcttgactctgaagtgctctgaccttacaacaaaccatgaaaactagtttttaaaggactttttatgctgaactagttttagacttcaagaaaatttgcaaacatagtacagaattctctttatatctcccatccagcttcccataatattaatatattaaataaaaatgacacaatggtgagaaccatttagttgtcatttctccttagtttccttcattcgctaacagttccttagtccttccctgggtttcatgttctcgacactttggaagaatattgattagttactttgtacagtgactctcaatttgggattctctgattttctgtttttcagaatttgactgaggctgtgcagttttggcaagaatatcacagaaatgatgctgtgtgctcagtagatcacagtggagctcgtgaggtcattgtgtcttttttttttctttttttttgagacagagtctcaatactgtcacccaggctggagtgctgtagcgccatcttggctcactgctgcctctgcctcccaggctcaagcaatgcacctcagcctcctgagtagctgggactgcaggtacatgccaccatgctcggctaatttttaaactttttgtagagatggggtgtcactatattgcccagactgctcttgaactcttagactcaagcaatccttctgcctctgcctcccaaagtgctgggattacaggtgtgagccaccatgcctggcctttataatttgttttaacagactgaagtctcaataaactgacaggtaccctagctagaaacacacacacacacacaaacacatacacaaaacctcatgagagttttgactgtgttaagaaattcctgagaaccacaagcaaaagtaacatcaattctgcctttttctccaatgacatggttactgaaataagcactggttagcagaggctgagggcatctggagtttacttcctatttcttattgtttccctactagctggcgaagcacattgtctgatagaaatgaacttttggtgtatgtgtatctctgagccccatatgacaaagccagcttgaatcatgctccaaatactcattcatttccttgtatatgccaggctagactctggttgcctgtcctacctatgagccaggatcattggatgataagcactaggaaggtttttctagaattctgccattatacttagcctacacacacacacacacacacgtatatatacataaaacatattgattctatattaagattgaaagacataagtcccatgaaaataagggttgttaattttctcacatcttgctctgctcagctatagtcaatttaaaattgcagttgaatacaaagagagtttgctgtgaatacattgaaggccattgctttattcaggtgggcataattacagagaccataaggagactcccttttatttattgatctgacttctataagtttcctggatttcaacattttttcttgtttagagatatactgtctgaaaactattcaatttgaaatgtgtccactgtacaattcagtccttggaaaaaaagcctttagtaattaaagcagccatggtgtacctgctggcactaaaatatccctgtaagatgttagccatcaatatttctatagaaaatgccttattcaacaatatgctcttattatttcagttacagacacttttgtaaaagcacacatttaaaatgcacattaaaagaataggggaaaaattgatggtttgtcttaaaaaggaaaaacctgcagaattgggaaaaatagttttgtgagcacattttttgatagttgtattttttttaattttggacaaccattttgagtaacaatgactattctgagagcctatctctgtaaatctcttatcaatagtaagtaaagaagataaagtcagatgttgattagatcatatttttaaatattggtgatttaaatcttaaataaatatttgggattttgttgttgttgttaagacagagtcttgctctgttgcccaggctgcagtgcagtggtgcaatcttggctcactgtaacctctgcatcctgggttcaagggcttcttctgcctcaacctcccgagtagctgggattacaggcacgtgccaccatgcccagctaaattttgtatttttagtagagatggggcttcaccatattgccaggctggtcttgaactcttgacctcaagtgatccaccagcctcagccccccaaagtgctgggattacaggcgtgagttactgcacctggccttaaaaaaatatttgaatcaaatattggcaactaaataaatatgtttgggtaaaacctattccaatgcttaaaacattataatgtgccagaaaaattatacacagttcataagagaatatttgttaaatagttatttttgatttaatgtgactcaaaatcagaacttaaagagactttaaaagtcatatggggagtaaattggtagaagtgtctggaggataatctgaagttgcaaaaattttaaagtatatgtgtgacacttctgcttgcccaatttatcataaggaaatagtaaaacaaagttacaataatgcccatgaaattacgttcaccacagttttacttatcacgtaaagacactgaaaatgacaccaatggcccaaacagcgattggctgataaactttaagacaagtagtctcaagtcccacaccttcaaccttgaaataaacctggacttccacagattctttttaaatgctaaatgtgagctcttgttcatctgaccagaaaagaaaaccagaacaaaacaacagcagaaacatcaacaacaaaacccttcccagccgaggagcggtggctttccctgcctgaccagcagcctgggttacagacctgacctccttggtatcatggaacctaagaaattattggctattttctgcagctgttttcacaaagccacagcggaggtgaccttggggtggggtgaggcaggacccagcagacgggagctctgggcttcccctccagtgagagtgacttgaatttcatctcagccacaactggttttctaggtaagattttatttgaatatgctttctaaagccaaaaaagaaaatataagtttaaaaaccactactgtaccacccaacaattagttgttgttattgttgttgttgttttttcaaattagctcaaaccaggaaaacaaagtgctgattttagttacaaggattatagatcacataagtctggaacaggactgccatctcttattcaaacccctttgtaccagatgaattccaaatactttgtatttgttagatagttaatatagaacctatatattatgaaacacccctagcaaacatggaggcagcaactcacactcaaatacattaatagttctgaagtgagtcatataaaaattcacactagatgaattaaataaaaatttaagttacctcatatcaattcatatcagactttttaccaactgagttgggccaaatccttaagaaaattaaagaaacaaacaaacaaaaaaattggctttcagagctttttggatgttaggattgtggctcaggggctgtgcacctgtgtgatgcagacaaagctggagttcatgaggagctgcaggtggagaccccagcccagccagatgccccccagaactgaagtcagacacgtggatgctcacttgggaaggcaaagagtaaaattcaaagctccatacagaaggtagaaagagctcatcagagaaaacaaattagaggtcacatgcccttttcagcagtcaatatatatttctattctttaaaacacattttccaagaaaaggactatgtatactttaatattcatacaatgccataataatctggtaaagtgaaaatatgtccaccttatatgggtaagtgggaaatgttgccaaaaactatttttttctattagatagatcccttacccaagtgtgcacatgaattttaaaaagatgctatgtaaatggataaataaccaaaatgttaacagtgcttaatttcagggagtgtaaatttgctgatttttatttttattttatttttccttttctaagtgtttctgtattttttgaataatgagaaagtatgatttttaaaaaagaaaaacagaactctttactcttggtgaaaaatacaattattagcggttcacatgtaatttagtccctcagggaccaagtgattcacctaaagtcacattgttaatttggagaaaaactatgcttggactcaaggcctttgactccaagccttgcatcctctccatttctccaggctgcattttgaaatgaagcatgaaggatggcccctgccttcaaagtgctaatgattaagttgaggagataagaaatataactaggaagcaattaacaaacattacaagatgctatctatttaagtaactgctgcaaatccttttggaagtgggaggggtcatctaaatctcaaataagagaatacagtataacattgcatgacacgtattgcaaattcctatgaattcagaggagtagaagataaaacttagtagtcccagagaaggctctactggtaaaagacagatacgctttgaaaaggttaaggtcaggaaggatatttgtttccacaaggacatatccagacaacaagaccactgattgatggtagaaatagttctctgcatatgctagagagtaggagaacaggactggacaggtggagtaggcacagtttacagaaggctttgaaactgaaaaataagaggatgatttagaaatgatgtggaaagaaataggagccatggacagctttcatcgagggaatcacgggtgggacaaaggcacttaaactgcatgaatgttccagaagtggcatgtagggtggataggcaggtgaggatgatgtcgtggaagtcaggtgcagaactatcgaagcaatgtctgatgttgggcagcagaaattcacaaggaatcaggatcagacatggaagcagaaggctgagtcacaaagatgccaaggtttggaatggatgtctctgaaaacagtgatgacctgacagagatagatgatttaagatggggttcactatttcagaaggcagagcaaagagtaaagaaaacatgaagtgctcttgttcgttaaagttataactgtttagccatgtaggtttgagcactaaggccaaggggctaggttcaaactttcaatttgcaatgtggcttgattctgttctgatgcatcagccatgctcctcttatttcatgcaactatagcaaacacagggggattaaaaatagggaagacagacaagtcaataccaattataggaaaatgatttcataaacaagcaaaattcatccaaatatgatcaagtaagaacatgattttatatggcttaaatagcatctaaatgttttctttcgatttatttgtgcgagaaaaaagagaggttataaatatagaaaatggatgaaaatacaagtagttacatcttccctgtgtctgcttaggcattctatattttgcttgaagtgttttttaagaaatgatttatcttcattccatctgccctgtcagagacaccttggttgggtcagaatgactggtttagctgggaccccattgcctctgaacctttaaacagacagcgctttgaatttcatttcagagatcaggtgacatccaaatccacttaatgtgtaactggtatggtttttgatgtcactggagaccctgatgaaattacaatcctattagtcatgacgggggaagacaggagaccttaggtggctaatgttccattcataacaagaaagagccatttagcatttgtaaagggcattgatttctgatagttccctaaagaacaaggctcaagtgaagaaatatgaccagaaagagcttgggaaagaaatgatagaaaaggcaagattgcatttatccaaacagctttactctgtgtactttttacaacttcacttgaatccaaagaattgagtcttcatgtaaaagtggatatgaggaaggacaggaaggacatgctcagctacacagagattctgttactgagaaatctggggaattataccgtgcccttgattgataccaatgaggtgcctctaaatataaagggtaagtagaggttatgtggaaaaagggttttaatctgggtgataaattgccagattccattatgcttaatgagtctcatcagtgcatagctagactcaagaaaataagacccctttcaaagcctagtataagcaaattagaagaattaataataaaaatcctattaatgtgtatgcaatttcaagcagttaatgaagtcaatttaaaaagtttggctaacgtattttttttttttttgcattttttaaaataaaaatacctgatcatcaaaatagatttgttcttcaggattttttttctttttttcccccaaatatatcctatgtaagacttaaaggattagatttcctttggtttactcttctccagggagggccctacttagaagttatgggatatgacaaagggagtgttgcaggtcttcaaatgtataaaatgcttattgacctgaaagttacaaatgagattcattcaagcaaatttgccaagcttcataatatccctcctaagcaaatggcgactacctgaagaaaaaggttctcagtcacctgcctggtaaaacataaatctttgcttctcaacataaggtctcaggtaggaaataagaagcagggtctacaaacatctatgtgtggctcaaaacagcagtagttgttgtctctgaccagctaagaccttcagtcccaaataacagagaatctgctggatttgcaccaacaaatttttgtgcaataaaccatcagtcatgggttaaaaatcagactctcacttcttgccaattggattcttttaagccatcatttagaaaagaatctccatactcaagcatataatcaaagcatgtgggagatgagaaaaaaggtagcccctgttttgtagttaaatccctaggcaagaagcacaatcagacatctgtgcgtatttagatttccatgaaaaggaatgccatgtgctccttaatgccatgtgaaataacataactcatggttttcggatggcacccaggggcatggagagtgtaatgatgtccgcttcagaagttaggaacacacttgtgtgcaatgttacctagataatagtcacagtgtctggcacagagtaagcaccctataaatatttcttcaactctgaatggaagagtgagttctttcatacacaatctgctatgtaaagtttgtacatcctctgttttgttacaaaaataatatatgttctcactagcttgtggtttaacctctgaatcaatgaagaatgggagccactccctcctcaatttttttccttcctgggctgctaatgtgctgcccctacctggttctacctccatacctcagtgcttccttactgggcttcctcttcaaattacttgtcgccatcccaaccctgtttattttcttttacattttctaatcaaggattcattgagttgtatgacttcaacaaatgcctttatgcaaccgtgccctgaaatatttacaagcttatcattatactagattctgtaagggataatatagtttagtaagaagtgcactcatatacttgaagataaatgacaattttatggccaaatgattgaaaagatgcagaactatcattagaaaagaaaaagagccctgttgtttctggcaaaggatgtgagatttgagtggtccttgaaggatggatgagagtcatacatggagagctcgagaaggagaggctatcaggaggtcaactgttatgggcaaagacggtggtgatggaaaactatgtggctggtttggggtcaatgaggagactgctgggtctgccttgaaggtttcattatagaataatgggcagtgttgtggaaagacaggtggacccactctggaagccctcaaatgcttgattaaggaatggattttatcccatgggaaaaatagaactatgtgggattttaagcctgtaagggacttaataaaatgattcctactgactagaaggttctttctcaacatctcctcactgcaagtccattccaaatcccatgtttctttttcctttgtccactggcttaattatttctgtcagtgttaacagcatttttcttggactcaaaggctgttatccttgggaatatctttgaggtttgtctccaacttcaaaactatttgagggttcactgaccaaaagcaccttggtaatgctttaaataaatacatattcctagaccctgttcgagaccaactgtatagtggtagattttaggacccagatttctacctcttacagaatgagtaaatctttgctaatggttacttttcctttcaaatatctgtcaaccttcccatttcttttcaaacctactgcagtcactgtaactcagaacttccttatccttgactagttactatgacaggcaccttctgggttacatccttcactctaatatcagcatcttctttacagaactcatttggactccaggagaatagcaacataatcgtaattcagatcagtggtactcagatgtttcagtggaggtgattctaatgcaaacttttcttcaggagggaaataaaatatttaggtatacatttggcaaaaatatatgtatctttttttggatgggggatgacagagtctcattctgttgcccaggctggggtgcaatggcatgatctcagctcactacaacttctgcctaccgggttcaagcaagccttgtgcctcagccccccgagtagctggaactacaggtgtggccaccatgcctggctaatttttgtatttttattagagacagggtttcaccatgttggtcaggctggtcttgaactccaggcctcaagtgatccacccacctcggcctcccaaagtgctgggattataggagtgagccaccacgcctggccaatatatatatgtactatctacagggaaaactacaactctgatgaaaaaaatcaaagagctaaataaacagagagatattccatgtttatggatagaaagactgagtattgtcaaaatatcagttctttcaaacctgattcacagattcaatgcaatcccaatcacaatcccagcaagttattttgtgcataatgacaaactaactctaaaggttatatggagaagccaaagaccctgaatagtgaaaaatatcgaaggagatgaataaaagttgaagaactgagaccgtctgacttcaaaatgcactacatggagactcaaatcaggaccttgtggtactggcgaaagaatagacaaatcgattaatgggacagaatagaaagcacagaaacagcacagaaacagacccatataaatatagttaacttgtctttgacaaagaagcaaaggaaatacaacggagaaaagatagtctttccagtaaatggtgctggaacaaatggacgttcacatgccaaaaagtgaatctagacacagacctcacaacatttacaaaaactaattcaaactgaatcacagatttaaatgtaaaacacagaatggtaaaaccctatatgtaggatagtaatggtgcaatcacatgcctgggtatttacccaaaggaattgaaaacttatgtccataccaaaacctccacacagatgtttacagcagctttattcataattgccaaaacttggaagcaaacaaaatgtttctccataggtgaacggataaactgtggtacatcccagacaatggaatattattcagcactacaaataaatgggctatcaagccatgaaaggacatagaggaaccttaaatgcatagtactacatgaaataagccaatctgaaaagtactgtatgattctgactttatgacactctagaaaaggaaaagctatagagaagatgaaaattcagtgttttccaggggataaggggaagggactgggcacagaggatttttagagcagtgaaactactgtatattgtagtactgaatatatgtcattatacatttgtccaactcatagaatgtacactaagaatggaccctaatgtaactgtgaccttgggcgaccatgatgtgtcaatgttggttcaactgaaacaaatgcaccactctagtgggagatgtcggtgatggggtgaagtgcgtgtgtagggcagtgggtgggggatgttggtgatggggagaagtgcatgtctagggcagtgggtgggggatattggtgatggggagaagtgcgtgtgtagggcagggggcatgtgggacatctctgtaccttctgctcaattttgctgtgaacttaaaactgctctcaaaaatgtctactaaaaacaaacagaaaacaagcaaaaaccctacttttctctgtgctgttggtcttcagagaaaggagcggcatcttcaaagtatagtaaaagcctcacaactggagaagtaatcagcatcaggaaagcactcactaaactttctgcccaaggccaaattaactgtcttttctgcgctccgaaatactcagaagactcttgaaattccactgagtatagaacccaaagccaactggatttcaaacaattccaagttcacaaactcagtcagtctgtccctgcgcttttcttacaatggggaagcactgccaagccctgcagaagatggtgggaagcagtgcttatctggtaacggaacacctccttaaaatgaactctttccaggttgaaaattcccctgttccaacttctactatcatttgaagtgatgaacacaaaaagaaacacacttctccccacaatcttgtcctgtctttggcattttagagcttatccaccatagtttcttatgttccaagaaaattacattcttttggtattcttctagggtgttagtaatgtcttgaggaaacaatgtgggttagagatgatcagaacactgtgacatgagccgtatgaaataaacctggactatatttaaatgtctgaaaaaccggataataacccaaactggataacaagccaatatttttttaaacttttattttaagttcatgggtacatgtgaaggatgtataggtttgttaaataggtaaatgtgtgtcatgagggtttgctgtacaggttatttcatcacacaggtattaagcatagtatccattagttatttttcctgatcctctctctcctcccaccctctgccctctggtaggcaccagtgtgcattgttctcatccccatgtccacatgttctcatcctttagctcccacttataagtgagaacatgaggtatgtggctttttgttcctgagttagtttgctaaggataatggtctccagctccatccatgtccctacaaaggaaattatctcattgcattttaatggctgcatagtattccacggtatatatgtaccacattttctttatccagtctatcactgatgaacattgatgaagccaacatttttaagaataggtgtataaatgaatacagaaagtcaaaaatgggaaatgggtccaatgtctgaaagataagcacatggaggaaagagagggcttcagagtgggcccaataaattcatgtcaaggaagtcagctcctgcaggaccaaatgcctggctaggtgtacaggaaacaaaagtgtggtggcatcaccaagagggtctgggcaacaaaatcaggcacaggtacaataaatattcagtagacatctattgaaagaaagaatgaatttatgaagatttaggtatcagaaaggaagaactgattccaatacatgatggctgtcatctcaaattgagaatattcaaacctaacaaaattaatacacttatgaagaccatgttatcagaaattggaaataaattccagtaaatgttgactaacaccagaaactcagtatgttcaaacccaactaaaaccatgtcagtgtggcatcaccattcagcccctcacacaaacaaggaatctgggaatcatcctcgactcctccttctcccccgtttgcccgagtcctcatgccaccaagtttttttgcttctacattctacatactcttgaaatattgccccttgtttccatcctcatagccactgtgattcaactgtctttatcaactttcactgagaccgtggcagtgacttcttcgtcactgtgcccagcttgggtctcatccctactaccaccactacccaaactgtgggctgggtaatctttctaaaacacagactctattacagcatacctttgcttaaacccttctggtgaccttcccctgtctacaaaataaaatggagagcatttgggccctatgtgcctttccaatctcatctcttgtcatttcccatcttgatcacactgggactagaaatatgaaaggcagaataacacaattgttaggagctgagccacagcagtgctagacattgccagtggtacctgtgtgacataaaggggacactgtcgctggtatatcccattcctataggaaacttggattcctttttagatgagtacatataaccttacagctctgtagagaggcccaaaagaaattgtaagtagtgtattcatttgtgggtaggaaaaaatgtctgaggtatcagaagtaatgtttttggagttccctgcataaaaggtattaggggaaactaacatacaaaaaaagaaaattcttacagatgagtgtcttgtctggtttttctgagtcatcacatttttttcctatacactggactctctcattcatttgtagccatccaccagacacccatatacagctattatttcttattttaggttaatattgccaagaagttacataatcaaaacagaaaatctgccaaaaatcccaaactgtataactattcatttcaaagccaaatataaattatttgagattagccaaagtttcaaattattatgtgtatcagtggattctgaaaagcatacaggctggaataagcatagtaaaaatgacagagcaagcttcttgaattcttggtgaatgctgcagcaaataattttgccaacaaccacacttcctaaacctcattaagcaagtaggaaagaataaactattccattaccattcctcaaactggagaaaaaaatctaggaggaaaagccaggggaaagcacccaacaaaagcatttcacctcaaaagctctaaggtagagcaatttgaagttagaaaaatgggtttaagtagctactttggttgatttctgcctagttaggcttccagtgaccccctaatttgcctggaaataatgcagagaccacctaccgtgtgcaaagcagtgtgacatttagaacaaaggtggcagaatctcaatgttcaaaagaacacataccacatgaggtaggggactcagaagaaggaagtaagaactgggctcacttccatttacttaccaggctagggatggagccatctgagggctaagccccaaactggccttggattcatgagaccaggaaaacccctgatccacacagggagcagtctaattggctgggggcagggctgctctcataacccaccccaaacagtggcagtcacaagcgaggacaaacttggaaggaggcagggcttcccaggtgtgttatatgaaccaccggctttttggaagattagacaatccccataaaaagataccttaatagctatatgctgatgtctgtatatattagaagaatataaaaaataaaactaacctattaacctcgtgatttctatgctaagttttaaaaagttgacaaagaaaaatggtaagtaaatgatagtacagatcttactaggatatggacacatcattaagattatatccaaatgagtgaagtttagaaaagcctggactagaccaaagagataagataaagcaagtccatggaatgaaaaaaaacttctaaggctaactctgaaaaaaacgtatatatgatactctcacaaatttttttcctgccttttagataaattacagacactaaacatctgaattatagtgtagactatcaaattttgtcaggacaaccagtttggaaaacctgcatcccacttctcagcttctatctgccaagttttgcatccaattgccccttccactgcatgcaaacctcaggtggggtgtgggagtgaagagtaacaggtgtaattaacctgcccacacttccttcccaagtctagctgttgcagcagtctgggagcatcccacagccagggaaagggtattgaagggaaagcagtatctgccacctaggaaattaattgaaaagaaggaaaccttcctccgttctgtctcaccccaattcagaacatgttaattgcagagaggctaagttcattaagtgctgcttaactgttgtctgaagattatcacatattaaatgtaaaacctaacagtcttcactcttctgataaaagtttgtaagagtatttttccagaagcccaatctggaatgattgtggagcggtgacttgttaaggagcttaccctgccaatgtgtatgtgggcactttgtttctaattatttcaataaacgagctttataagaaatcctagtaataaagtaacttatgccacagaagaataaatcctggtgctctcaatatccagataacataaccatgctattaagcactgcctcgtcaataatggtagtctttgtataatgatagaactctatttacataatacaccaacagtgcctaatgcaaaacagggtttacatataacattagttgaatttacagcatgaattcacattccacctttgcattggtcagaaaacattatttcacacttcactgctctaacaaataaattaataaagctcacctcatctccagtaaatcccgacgtgcatacctcgtgattcaaaataataataacctccagtcttgtccttgcatgtcctttgaatcattctcggagagacaatcattttctggactaccccaccctgcatctgaactccagatgtgttcaaactggattctggccaaagctagagaagtctcagggatagtgacgatctcatcattttatgtcaagtgaagggaggaaagttaccaggattttcttgttttccttaaaaattcacaaaataccaagtctcatctttctagggtaagaattcagtaaaacactccatgcctgtatctttacttgaattgtcagctccatgtggacaggaaccatggccttctcatttattcacttttctgtcccttagttcctggtacagacaggtgctcaatgcctgacacatagtaggttttcagtaaacacttgtggaatcaatgaaaaaccttactaatattgcatctcagattggagaaaatgatccaaggtaatgtcagcgcacttcaaagtgcagtaaaatgcagctgtcatttatgtatcagagactttatacccatccctgtgtaagatattctgtgagaagtaaataataaaaattgggatttatagtcagatgaagggaaacagcccagtgcaaccgaaataccagcaagtgaatagatgtatgtacataattggaaagatgttcatactattacaatatataactgtcaaaaagcaaattgcagaaatatgagagagggaaaaaaattatttttggcccctttgaatctcatcctgtggaacctaaaagcaaatttctccttttagaaagaaataaaaagatatttatttattccttctatgatatttatttgtatatttatgtgcagacagacagatgaataagatttatcctagtataagaaaaagtctaaaagggcacacaccaacccattcaaactgtttataacagtgctattaaatctaaaaggtagagtttgggagaagattttttttcactttctatttaatgcatttctgcattgtctacatttttttacagtgagcaattttttttagtaaaacaaaacaattagaatttttttaatgttataaataactaactacatttgtggtatatattgagtgttttaggagctcaataaaactttaattgtctggaatataattaaccaaagacctcaatcaaccagtatttttcctctacattctactcttagaaaaaaagaagcaaatcagataaaaataaattcatatcaagaatttatggagcagttgtatttttccaaggtaagtagctttagggtcttgtctaacttccaaacattcagctctaatgtatccatctccatgttgtctgtacaatgatgagtgttgttcagacctttgctattctatctgtgctgccaggcaagcaccttgtcaggatctcaggcccaatcagacttactgaaccagaatacctggaagtaaagtccaggaacctgggttttaacaagatccctaggtaatatgtttgcacattaacttggagaagcaccagtttagaagactaacccctgagttcctgcatgatcctcaacctataaaggaagacttattttcatcagattgtccatttaaaaatagaaaagtagacattttacatatactgcaggaagtgctaaacaatgttacccactgaacaaaattaactagacatatattgaaccccctcttatcccacaaaattgttggaaatgacattagagcacaacacagtaaaagatagatagtcaaaaatttcagctccagaacaagtctgggaaagtagaatcctgcaattacttgttttaaccatcagatagtgcttacacattggcagggaaaacagaaggccatatctcaggacgaggatgacaaggcatggcacttaggctgctgccagtccccattccataccaatgacagacatcgtcagtcatggtgctttctcatcccacccaagatgctgcaccagaatccttctcaatggatatcacaggtactcatgtctcatgaatcaaagttagcacttaagaagaaacatttctaacgtccctatttgaaaactgctggacatgataaataacctgattaagagatgataaatgaaacatgagtgatttaagtcctcatcgggtgggcaaaccaaatatgagagattcaaaatagccaagaactgctccctctatccagaaatgtatttatttaccattcctcaaactgtttgtttagtgtaggcaaagattagaaattagaataaatgaacattagagccaggagaactcttatagactatctagttcaactgcttctcttacacaggaggaaatactgatctaaagaaatcacagtggccaaatcccatagctaattctggcagaacccaagtgggaatcaatgcttatctaaccaggatttctcccattgcaccaaatggcccctaaagccatagcagccactggcaccataaactggatacaaatacacatgtggattcagaaacagagaatcacatcacccctagctctggggataaaccaaactcatgtagtggcggaccatgctccttggtaagaggctatagccagccaccagggagctctgcgctgaagtttgggtaagcccacaaaggggaaagctcctccagaggccctgcacagttacttctgagagacttgtgttcttagatctccccaaggtattccaatttaacacatgcaaaatcaaactcatgatttgcacgacacatccatgccagaacaacaaacctactcctcctcgtctgatagttgtctttgagtaaaaccactcttcacacagttatgcagggctgaaagctaagagtcatccttgtctcccgcctcttcctcaatctcaaattcaacgaacatcatcatcaattatattcttagatgtcttggggatcatcctcttctctatacctaccccattactatggtagtgttaaatactctcacctgttggcttagtcttctgcaatagcttgttaactgatctcacacgtgtattatgcccctccctcgaatctgttcaccacacagtacctagagtgactttttgcaaatcagaatggtatgccactcaccttcacttaaaccattcaataccttctcattggttttaacatgacactcaagtccctacaggatctgaccgctgtctacgtctcctgcctcaccccttaactctctgcacaccacactggtcccctctcacttcccctgctcctcataattcctttgactgcagggcctttatacatgctacctcctctttctggagccatctgcatccttcacatcccagttccagatgtaaggcctccaagaagccttttcaggttccactgaatatgttacttctcacaggtaagcatttactctctcatgaataagcatttgttttcttaggagactttcatctgttaataattagacattcattggggcattatatgatcaatgtctgtctccttactcaccaccccattctctgtagtctggagagttcaggacagcaggagagatgctagaatctttgtcctctttagttcatcattttgtcctcagtgtcttaccaaaggcaacacacagtagacatctaataaacactgaattgaatgaatgaaaaaatgaacaaataaaagccttgtatttaagcataagccactgattatgcttaaattattattcacagcttccaggcacatgtaaaagtgatgcattctaggattgctttttttaaaaaaaatttttttattatactttaagttctagggtacatgtgcacagtgtgcaggtttgttacatatgtatacatatgccatattggtgtgctgtacccattaacttatcatttacattaggtatatctcctaatgctatccctccccactcccttcaccccacaacaggccctggtgtgtgatgttccccttcctgtatccaagtgttctcattgttcaattcccacctatgagtgacaacatgcggtgtttggttttttgttcttgcgatcgtatgctgagaatgatggtttccagcttcatccatgtccctacaaaggacatgaactcatcctttttatgactgcatagtattccatggtgtatatgtgccacattttcttaatccagtctatcattgttggacatttgggttggttccaagtctttgctattgtgagtagtgctgcaataaacatacgtgtgcatgtgtctttctagcagcatgatttatattcctttggttatatacccagtaatgggatggctgggtcaaatggtatttctagttctagaaccctgaggaattgccacactgtcttccacaatggttgaactagtttacagtcccaccaacagtgtaaaagtgttcctatttctccacatcctctccagcacctgttatttcctgactttttaatgcttgtcattctaactggtgtgagatggtatctcattgtggttttgatttgcatttctctgatggccagtgatgacaagcattttttcatgtgtctgttggctgcataaatgtcttcttttgagaagtgtctgttcatatccttcgcccactttttgatggggttgtttttttcttgtaaatttgagttctttgtagattctggatattagccctttgtcagatgaatagattgcaaaaattttccccattctgtaggttgcctgttcactctgatggtagtttcttttgctgtgcagaagctctttagtttaattagatcccatttgtcaattttgacttttgttgccattgcttttggtgttttagacatgaagtccttgcccatgcctatgtcctgaatggtattgcctaagttttcttctagggtttttatggtttcaggtctaacatgtaagtctttaatccatctttaattaatttttgtataaagtgtaaggaagggatccagtttcagctttctacatatggctagccagttttcccagcaccatttattaaatagggaatcctttccccatttcttgtttttgtcaggttcgtcaaagatcagatagctatagatgtgtggtattatttctgaggtctctgttctgttccattggtctatatctctgttttggtaccagtgccatgctgtttggttactgtagccttgtagtatagtttgaagtcaggtagcgtgatgcctccagctttgttcttctggcttaggactgacttggcaatgcgggctcttttttggttccatgtgaattttaaagtagttttttccaattctgtgaagaaaggcattggtagcttgatggggatggcattgaatctataaattaccttgggcaatatggccattttcacaatattgattcttcctacccatgagcatggaatgttcttccatttgtttgtgtcctcttttatttcattgagcaatggtttctccttgaagaggtccttcacatcccttgtaagttggattcctaggtattttattctctttgaagcaattgtgaatgggaattcactcatgatttggctgtttgtctgttattggtgtataataatgcttgtgatttttgtacattgattttgtatgctgagactttgctgaagttgcctatcagcttaaggagattttgggctaagtcgatggggttttccagatatacaatcacgtcatctgcaaacagggacaatttgacttcctgttttcctaattgaataggctttatttctttctcctgcctgattgccctggccagaacttccaacactatgttgaataggagtggtgagagagggcatccctgtcttgtgccagttttcaaagggaatccttccagtttttgcccattcagtatgatattgcctgtgggtctgtcataaatagctcttattattttgagatacatcccatcaacacctaatttattgagagtttttagcatgaagggttgttgaattttgtcaaaggccttttctgcatctactgagataatcatgtggtttttgtctttggttctgtttatatgttggattatgttttttgatttgcatatgttgaaccagccttgcatcccagggatgaagcccacttgatcatggtggataagctgtcggatgtgctgctggattcggtttgccagtattttattgaggatttttgcattgatgttcatcagggatattggtctaaaattctctttttttgttgtgtctctgccaggcctgggtatcaggatgatgctggcctcataaaatgagttagggaggattccctctttttctattgattggaatagtttcagaaggaatggtaccagcccctccttgtacctctggtagaattcggctgtgaatccatctggtcctggactttttttggttggtaagctattaattattgcctcaatttcagagcctgttattggtctattcagagattcaacttcttcctggtttagtcttgggagggtgtatgtgtcgaggaatttatccatttcttctagattttctagtttatttgcatagaggtgtttatagtattctctgatggtagtttgtatttctgtgggattggtggtgatatcccctttatcatttttattgcatctatttgattcttctctcttttcttctttattagtcttgttagcggtcaatcaattttgttgatcttttcaaaaaaccagctcctggattcattgatttttttgaagggttctttgtgtctctatttccttcagttctgctctgatcttagttatttcttgccttctgctagcttttgaatgtgtttgctcttgcttctctagttattttaattgcaatgttagggtgacaattttagatctttccggctttctcttgtgggcatttagtgctataaatttccctctacacactgctttaaatgtgtcccagagattctggtatgttgtgtcttcattctggttggtttcaaagaacatttttatttctgccttcatttcattacgtacccagtaattattcaggagcaggttgttcagtttccatgtagttgagcagttttgattgagtttcttaatcctgagttctagtttgattgcactgtggtctgagagacagtttgttataatttctcttcttttccatttgctgaggagtgctttacttccaactatgtggacaattttggaataggtgtggtgtggtgctgagaagaatgtacattctgttgatttggggtggagagttccgtagatgtctgttaggtctgcttggtgcagagctgagttcaattcttggatatccttattaactttctgtctcattgatctgtctaatgttgacagtgcggtgttaaagtctcccattattatcgtgtgggagtctaagtctctttgtaggtctctaaggacttctttatgaatctgggtgctcctgtattgggtgcatatgtatttaggatagttagctcttcttgttgaattgatccctttaccattatgtaatggccttgtttgtctcttttgatctttgttggtttagtctgttttatcagagactaggattgcaacccctgccttttttttgttttccttttgcttggtagatcatcctccatccctttattttgagcctgtatgtgtctctgcacatgagatgggtttcctgaaggcagcacactgatgggtcttgactcttatccaatttgccagtctgtgtcttttaattggagcatttagcccatttacatttaaggttaatatagttatgtgtgaatttgatcctgtcattatgatgttagctggttattttgctcgttagttgatgcggtttcctcctaaacttgatggtctttacaatttggcatgtttttgcagtggctggtactggttgttcctttccatgtttagtgcttccttcaggagctcttgtagggcaggcctggtggtgacaaaatctctcagcagttgcttgtctgtaaaggattttatttctccttcacttatgaagcttagtttggctggatatgaaattctgggttgaaaattcttttctttaagaatgttgaatattggcccccactctcttctggctcatagagtttctgccgagagatcagctgttagtctgatgggcttccctttgtgggtaacccgacctttctgtctggctgcccttaacattttttccttcctttcaactttgatgaatctgacaattatgtgtcttggagttgctcttctcgaggagtatctttgtagcattctctgtatttcctgaatttgaatgttggcctgccttgctaagttggggaagttcgggataatatcctgaagagtgttttccagcttggtttcattctccctgtcactttcaggtataccagtcagacgtagatttggtcttttcaaatggtcccatatttcttggaggctttgttcatttctttttattcttttttctcgaaatttctcttcttgcttcatttcattcatttgatcttcagtcactgatatcctttcttccagttgatcaaatcggctactgaagattgtgcattcatcacatagttcttgtgccatggttttcagctccatcagctcctttaaggacttctctgcattggttattctagttagccattcatccaatcttttttcaaggtttttaacttctttgcgatgggttcgatcttcctcctttagctcagaaaagtttgatcatctgaagccttcttctctcaactcatcaacgtaattctccatccagctttgttccattgctggtgaggagctgtgttcctttggaggaagagaggtgctctgatttttagaattttcagattttctgttatttttttccccatttttgtggttttatctacctttggtctttgatgatggtgacgtacagatggggctttggtgtggatgtcctttctgtttgttagttttccttttaacagtcaggaccctcagctgcaggtctgttggggtttgctggaagtccactccagactgtttgcctgggtatcagtagcggaggatgcagaacagcaaatattgctgaacagcaaatgttgctgtctgatcattcctctggaggtttcgtctcagaggggtacccggccgtgtgaggtgtcagtctacccctactgggggatgcctcccagataggctactcgggggtcagggacccacttgaggcagtctgtccgttctcagatctcaacctccatgctgggagaaccactactctcttcaaagctgtcagacagggacatttaagtctgcaggatttgtgctgccttttgttcagctatgccctgcccccacaggtggagtctacagaggcaggcaggcctccttgaactgtggtgggatccacccagtccaagcttcccggccactttgtttacctactcaagtctcagcaatggtgggcgcccctcccccagcctcgctgccaccttgcagtttgatctcagactgctgtgctagcaatgagcaaggctgcgtgggcgtgggaccctccgagccaggtgtgggatataatctcctggtgtgctgtttgctaagaccattggaaacacgcagtattagggtgggagtgacctgattttccatgtgcaatctgtcacagctttgcctggctatgaaagggaattccctgaccctttgcgcttcccaggtgaggtgatgcctcgccctgctttggctcactcttggtgcactgcacccactgtcctgcacccactgtccgacaagccccagtgagatgaacccggtacctcagttggaaatgcagaaatcacccgtcttctgcgtcactcatgctgggagctgtacactggagctgctcctgttcggccatcttggaactgccccccacattctaggatttctgagggaaagttgcttgttggctatttcagtcattcaaaaagtccacctgcatacacttgcaaaatggcgtcttcttgaaagatgtatatatcctcagatgcaggccaagccactcctctgtgttcagacatcctgctgtgatctcttgtgtcttgttatctcagactgattatccctcccaaatgtcacacctcataatttgaggcagagatgccaactacataggtacctgagttagtcccaggtaagggataatgagtagcctgagaactgttagcaacagaacaaaccagggaaaagttcctaacgttttggtatgtattagagactcgacatggaagagcagaaaacaaagtgttctcttgctctatatcatagtcttgaagcaatttctgacatccaaagctgataattaactgtactaaacgatacacctatttctaacttgggccacagccaagtggatcacagtgttttcatggtagttaaaataattacgaagtataatcttggcttgtgcacacattcgtgtgggtgcaggcccgtgagctcaccctctctcttcccctccctctcctttgccagaagactccaatgttgagcaatgaactcaattcttttcacacagttacttggctttttcagagtggccgtctagtggcttgctccttcagtcatagaatcctgaaactgaaatgaaccttcagaatacattgtgccaagagcagagcttccaggccacctaagtaatatcttgattagaacagccatctctttggagaagtgaagcatcccgattgactcctcagtactgaagcagcctccaaccccagttccaaaatatacccacaactaaggatggcaggtaacattcatgtgataacactcacctatgcaaacaaacaggaaaataaattaccctgtgtcccatgggccattcctggcacaccagctgtgaccccaaccctccaggcccactgtggtccatgcctgtgtatatgtcgcaggacaagtccatgcttggtacccttcaggccctaagacaagaaagactccttccagtgtcttctattttacaaccggaaactattttagcctctgggagtcttctgggtaccagccagtgatgactagctccttgactctcctgttgaatgtggctattatgtgcataccagggaggacataaagcttcccacacacgacccgataccctggaggaacacaggcctatttccacactagttcctccttttaatccagctcctcagatctaatgctttcctaggctaagatctttgcctggtttcttacagaaaatgctctttctaatcttaattttcctctttttctaaaactataacacttttcagttttctcttggctccttcctcatctccccagccaggactgccatctcaccaacttttcatcagcctctaatttcccctagagtagtggttcttaaccctcactgcaaattaaaatcactttgggaattaaaaatagacgcctatgtagaagtgtgtgtgtgcctgtgtacaccgttacctgtgtctaggctccatcccagaaaaactaaggcagatctctgggagtgggacttggtcacggataatttataaaggatcttcagtgattccagtgtgtattcaggggcaagaaccactgccttagaacttgtttacttaactataccttttagttttcattcacacatgcagagtgtatttattggtaatatactcatttttatgtattaagaatttcgtatgcaccaagcattgtgttgggcactggaatgcctcaccatgtagatggagccttctttgatgttgatgttctgaacatttctatcctcagccctcctattctttccacctacactttcctgagagctctctgccacgtcattgtgccaactaccatctactttctgaggaaccctgaggctcaatcttgggagcttgtttggaggttctagcagggaagcatggccactcagatatcctgaatgaaagaacagtcctcctgtattggggaagactgtccccttcaatccacagtgcagcttcaggagggttgcacatggagcggtgagggaggaaggagacacctgcctaggcagccagatcagccgaatcaaccctggcagtcaatgggggacagatatcacagccagatcaccctcacatcccgaagtctaagtcttgagtccagacagctaccctgttacttagactatagactatctgactacatgtaagacatgctggctttagtgacccatggacaaatcagacccatatgtcaaaatggaatgttttaacttcccactgagtcttccttctctatcttcttggtggccccacagtccatctggtcacccaagtttgaaatctgggaaatcttgctccccagccctcttccccgcactcatcctctaaatctaatgttgtgtccaaaacattgtgtccctaatccaggccctcaccatttctctgtaaggtggctgatggatctcctgcctctagtgttgctagctatagtctaatcttcaccagaattaccagggtaaactgtctcaagggaaaatggaatcatgtcacagttttccattactcacaagtgaaatttaaggtccttacctggcacacaatgccatccaagatctggcccctcccaattctccagcccccgctagaatgaattgggagaccaagattgctatcacagcaacacagcaggggttacaacgtccctttgccagttaggctttcttatgcccacccccatggtttttatcatgctgtcttctctgtctgtaaaactcaccaactcaccccatcccacatacacacactgattagttgtattgccattagtctcagttacatctcaaattacatctacagttatgggctgcatatggacacttggatcaatgacagaccacatattcaatggtagtcccataagattataaaaccatacatgtactgtatgtttttatgtttaaatatgttttgatacataaatacttaccattgtgttgcagttgcctacagaatgtagaacataacatgctgtaaattaaggtttatagcctgggagaaataggctacaccatatagcctaggtgtataggaagctatatcatccaggctatgtaagtacactctgtgatgtctgcataatgacaaaatagccctaatgatgcatttctcagaatacattctcattattaagtgacatatgactgtagtatacgactttaaaaacagtataattatgtgtctttgtttctgtattccccatagatggtgaactccttaaaggcagtgactataactgtattgttacagtttttgttgtttttgtctttatatatttcacaacctagaacaatggctacaacatctcaagtactcagatgcttatggaataaataaatggagacataggttcctccccttaataagcttaaaattgaataaatttatttttgtttctatatccatttatccaagtccatagtttccttttccccaaactcttatatatactcagaaaggcccattacagtcaaatacaaacaaggcaatttaattcagcattgggagtatctagctaactgtaatattccaagaatgtagagggatcatgtgtattactgaatcataatactgatgtacgatgatttataaggcaacagcgtcgaaaactgacccctagcttcctataatttgattgcctttcagaaaaagttctcagcagagaactgagtctagagtcctctcagtacagaagccaggatacgcaacccatcaaataagactggtttgctgaatcaagagccactgaccgatttgacagctccatattcaaactaaacagctctttttggaaactagacttttggatgttataccagagatgtgactgagtagaacagagctttccaggggctgaataatccattatgcttattttatcagagattcaagttgaaaccattgggccattgagtaataaactcagtttgaccttgtcaaaatcctacacctagcagtattttgagaacttgtttgttctgccacttcgttccaagttgtttgaactttagttgagcccatgaaagctttacagttatcaagtgtgcttatatatgcacattatttcacattgatccacacctgcctggtagccatcactagaggccctggaaatattcagagaatcactgaagtgtgagcaacagttaataaaaaattcttgcagttttaattacaaacaaaaagcaagcatgtttcaactctataaaattcaactggaatatccagggaactattgctgtttataaccaccataaattatattcatctttcatactgagttagtgcagcttacagattgatatataaagcaacaagttctaatatttatgaaagtgtgagttctaccacctgtttcaggagttctaacctaacctccagaacaaataaaaatgaataaacaactatcttcgcccttcctgccatgggagtccttttgttctctaagtcatgtttctatctatgaagcaaaatgaaggactactaacaaccttggtgccatatgtattaggaaggaaaattgctgtgctttgtccaaaggcaattagtgttaggaaggaatcaagaagcaagccaatattggagctgctctttcttctgagctgtgactgctagaaaccatgacaaaaaataatgtgagagattctcatcagggatcttgggccccatttgcatattctttcattcaccacttactttgtaaccagccctatactggcattcaacacacaaagacaaattagacagactcctgccttctttacagagaagcttcctgcacaatgggtggttcacataagcaataaaatgatttggtaaatgtgagaatggagacatgcattattcattcactctttcaacacatatgctagcttgactttttaaagtcagatgctgtattaggtgctagcgaactaaaaatagtccttgcccttgaagtgtttgtgggatgtgtctatatggtaaatacccaattacaaagtaatgagattgggagtatggtaggccaaatgcatggaagcatctagcgagtcccctgtctcagatgtggaagtgaaggaaatctctcagagaagatggactatccaagacaagagctaagaatggaggcacatcagtcattgaaagaggcaggtgtggggttggaagctactgcaggctacaagacctagaaccagcaagaacgtggtgcactgtaaggttttctggattaaagtctaggttgtagtgttcatcctaagaagtttcttatagcaaagctttagatattataaccctttagtataagctttggaaattatccaaatcttgcaaatgaatgaatgaatcaatacatagtgacgtttctttacagtaaccccaggaaccattttgttggatgaacttcaaaaaacacagaacaccaaattcgaacacatgaaaggaaaggaaaccaaatttatcaaataagtcaccaggaaagaagacaaaagtaaaatgtccttggccttaaagacagttgcaggaagatataatcaaaactttaaatcatgcatgaaaatgcaaaacccatggtcttgcaggcctcagtggatggaaatatttaaaaagcagatttgttcacctggtctcaaaataataaaattgtgcattttcaccattcttcttaacatattaagtgaggtaaagaaaatgtttagcagaatgcctgccagtagtaaatatcccctaaatgttagctattatcatcatttatgagacaccagttaataatttatgtaacacattagtttttctaggaaaagcatttcttatttaagaaacaaacagttcagactaaaacatgaaagttttctaaaaggttagtgaggggacctgggcttgggtatgtgagaagcagcctcccagcttctgtgctcagggcacactccacctgagagagatggattggcaggaaggcttatgtaattaactcaatgtcatccagaaagtcctattcacggaaacacccttcaatgatatgagggcaactcttctcagaaataatggccagtgctgaagatttccttgaaaacaaagtatccaaggcttatttgggtcagaacaggtaagaccagacatacctttcccattcaatggtactggttaccactcggccttaacatggttaacgtgcaggagagacctccttctagtcatgatttaagttgtgtatttaaatattttgagtgaattcttggaattatcagaacattatacagtagtttctagaaaaagtatcctatgttcatctaaataccttttattttcctcaagccccaactgtcacatacatagcaaagatacattatcctgctgtgtttttttagagacagggtttctctccgttgcccaggctggagtgcaatggtgtgatcatagcttactgcagccttgaactcctgggctcaagcgattctcctgcctcagcctcctgagtagttgaggctataggtgtcccaccacactcggctattttttaaattttttttgtagagatgggttccctctatgttgcccaggcttgtcttgaactcctggcttcaagcaattctcttgccttgacctcctaaagcactgggattacaggtgtgagccactgcaccaggcctattcctctactcaacgtaccattttagcaagtttctttctctcaccatctccttcacattttctttctctttcaactttaccatccattgcctttgagaataacacagagaaactcaatcaccaacacatgtaaaatccaatggatatggatagcaaagttggcaagctgaggaatgccataaaaattctgcttggagtttaatcaaggtaaagttcaatgaacgttgtccattcaaatgaaaggtacaaacaaaattgggaagcataaagtaaatttgaaaaagcataaagcaatattggtaagcataagcataaatctcaatgaacaaagtggttgcaagggctttttaaatttgcagggactccatttacctggcctcagctctcccagccaagctgaactcagctcgttttcaccaaacaagaatgacttatcctacactcactaattctttcccttctcaaaacctgtagtggcccctaaatgcttctcatatcacattaaaacacccaacatagaattcaagggtatttatccttggcttttgaagatactagttaagacatatagtgtattagtttgctagggctgctgtaacaaagcatcccttggcttgtagaagtatcattctgatatctgcctttatctttacatggtgttctccctgtgtgtccaagttcccccctttttataaggacatcagtcatattggatgaggacccacactaatgacacctcatttcaacttggttacctctataaagaccctatctccaaacaacatcatattctgaggtttaggggttaggattttaacacataaatttttggaggccacaattcaacccataacatacagtactatattgtcattattattatttggtggcatctgtggaactgtaagtataatgggaaggacacatgcttgtcgtcagacagacttcaattgaaattcagctctgccatttactctgagcttcctgactgcgtgagatagagataaaatccctataatgcagaatggtgtgaagactaaatggggaagcaacttctgtaaatatgtaaggacagacctttgcacattacacccaactggaatgacccatatcaggtttgaactttcttctaataaaccaaagcataacacaacataatcaaacttgtttgcctattccaaaaaggaaaacctgtaagataattcataaaaatctctcaaatctctctgtttaagactctgaacactctctcttcccataacgaaatgcgtttcttgttcattcatttatggctgttcacccaactctatagaaaccaatctaaatcaatctttcttatggcctcttttcatgtttgaattcatctggccatttgatcgcaagctcttggaatggaagaacaatgtattcaatgatataattaagtatttgaaatattttgatataatatgtgaaaatattttctgaagacagccttcatgttaagcaccttctctatgtaattcattgataattagggaactttgaagcatatctttgtttcccagactgttctttctcattgacctggtgtccactgtctactaccatatgcttgttgcctctgttatctttattctcaaaacctccttgcagaaaagacacagatgtgttttgcggattaagcaataaagtgctctggggctgctgggtactattaagcaggttgtagagtgcacagggtgtccccaaaacacaggagattttcatatttatcataattctttagcagatggttgtaggtctgttttaatataagtctgaatgttacaacaattttctactctgtataaggagtgttttatctaatttgcatagggcactgcatgggctggccttggccttgcagctgataaatctgatatgtaattccccccaagagattctcaggcaaggagatctaagccagaggaagggaactctgtgcattttctgacttcagcaatgtgagagattggtttggggagaatcttttgacaagtcctgtattaaggagtggcctcccctctcagtgttggagaaaactgtagtcaagcaggctctggggtgggtagtgaatctgccagcattgcacgctactcacaagagagatggaggagcaaagccatggaaaacgtactgccctggtgctactagataagatcagagacctgatcctcagggaattgacaacagtgtcttcttcactcatatcacagctgaatcatctagaagatcaactcaaactcatcaaaaggaaaccctcaataggagaaacaagagatatgtaatattttgcagacatctgtcacactgctatgtgataaatagcttggagtacctaatgcatgcagggcttaaaacctagatgatgggctgataggtacagcaaaccaccatggcacatgtatccctattaaacaaacctgcacgttctgctcatgtctcttaaaacttaaagtaacataaaaataaaccttagagtggtgcattttaatacttcaaaaggagagtttgttttttaatcatctaaatcatgtcaatacaaaatattaatagcaatctgaccaatgatgatggccaatgacatcagtatgaaccatatttttaaaaatgtaattagcataagaattagaggaaaatatgtctgtttttaacaaatgcatattctggttggagagcataaaaaatagcaaacaataaaacttcctaggtggcaaaattatgtgatatatcaacattgacatctttgcagaaagacttaaggggtgattgggagcatagccaagcagatggagactgtgtgaaagcagaaccaagtgggaaggcagctcaagctcaacaactcctgaagcatgggagggcacagcacccttcactgagaggcccgacagggtttaaacacttgacttaaacttagccaatcacaggcaccaggaaacagccagggtgagaatgctaggggaagtttataaagtggagctgggctgggaattggcatcacagataatggtggaaagcaatggagatgaaaaaagaaacacaaaatatttaagaaaggaggaaccttgtagaaataaagaaacagacacctatcacagagaccgaggccgctgctcggcagatgcatttccttttagagcacgccctggagccttgagacaacatgctctcgctcttcattttaggcagccctgatgaggttctgcttcttacaatcacagctatgtaacaaaagctataggaataccaggaagaggaagaggcaggccaagggaacagcgaagggcctgggacaggaagaggggtggaattttttgtggaaaagcgggggaatcaagctatggaggactatggcaggtagagtaggtccagggtcttcattgcacagattaagaatgactcattgaccctaagattaaaaaaaaaaaacaaaacataaaacagctgtcattataaagttggaggaaggccgggaggcagttgaaggcagggagaaaagagttctaagattctgtacatatagataggcaagaattcaaattgccaaagccaacttgagcattttgtggggggcattttatatgaggttttaaattttgttttcttctaatgtttagactgaagagaaattcccttcaataagaacaactttaacagattattaaaagggacagtgtgaaaccttcaataatatttagaaatatgtgtaggagagctaatttgattcattcatcacattttcaagtaactggtgcgggctccataacacagtacagactacataacacagtacaggcttttgtgtattaaaattaatgaaaaagtagggggtacttatgggtctcagtagttctcccaatttaaatacacttaaataactgtgaaaactggtcagtttacacataaaatcatgccaatttcaaacagaaaagttccattgatattgaccacatttttggctcctattaaattgctacataaatatataaagcaggtctgtaatactatatgtctgcaaaaagatatttttggcaaataaaactcattttattttctaatttcaatcttccttacccagtattcttaaatatataaaaattatgtttggttctaaatatccaaatacccccactcccacacacttttttccacattgcttttatccatccttttacagatttatgcataaaatagtttcagttaatgaggatcacaatttttaatctcccaaaatccagcttcccattgtcacccagagcaacatctgaagtttaaatgtaaaggatcagtgattatcatgagctgaatggtacccgctgcccccctaaaaaaaaagatatgcccatgactttacccctggagcctgagaatgggaccttatttggaagaaaggtcattgaggatgtaattgtgttaaggatctccagatgagatcatcctggattactggtgggccccaaatccaaagataagtgtcctttttagaggcagcaagagaacagatctggagagaagaggagaagtgagaaggagaagatgaccatgtggggatggaggcagcgactggagttagacagcctcaagtcaaggaatgtatgagccaccagaaggaagctgaaattggcaaggaaggattcttccctagatccttcagagggagcccagcctcattgcaggcagctggcctccagtgcagtgagaaaaatttctgtggtcttaaactaccaagtttgtggtaatttgttagagcagctctgggaaactaatacaatgattaaatggtatcgatttatttttaaatttgcatttcattaagtttgtggcccatataaaaatgctgattttttttcttgtgatattgtgatttaataagaaatatttatttgttctgtatccctgctccctggcacagagcttctgaagcttctgaacccttggaatttcctgagtgatacgaatgagggcagcagcttttgttattcacaataaacccctttctaactatacctgagttactctgatgaggtgactctttgtgggaccctagatagtttccggatgggacctggttgctagaggaaccaaccatgaaattagagggttgggaggtgaaaggggctagagattcaactgatcatcaatgaacaacgatttaatcaatcacgtctatgtaacagaacgtccacaaaaaatcctaaacgaaaacagggtttggaaagcttctgggatagtgaacgcattgaggttctggcaggttggtgctccggagagagcatagaaactccattcccctgctcctcacatcttgcctagaatcttttccatttggctgtttcaaacttgtatcatttatagtaaactaataatagtaagttaacacttttccctgagttctgtgagctgttctagcacattatccaaactgaggagcaggtcatgggcactctcagtttgtagcctgtcagtcctatgtgtgggaggcccagaacttgtggttggcacttgaaatgggggcagtctagtgagagtttgatgctaactcaaggtagttactgtcagaattgagtggaatcattggacatccacttggtgtctagagagttggagaactggtcatgggtgtgtgaaaaacccacacatttggtgtcaggagtgttctgtaggtagaaaccaatcatcatagttggtatcagaggtattatggagtaaaagtagcacaggttccttaacttaatttctaccataattaaaaaaaggatattgggttatctcaccctggtttcccagtcagggctccaacctgggctctcataataacttcctcctttcctttttgacttttgttagcttccattgcccatggagtcaagtttattaagctccctagaatggcaatgaagtcctcacttactttccaaacttatctttttctaaaccttctcttggacctactgtactactctaatctgcttgtggctgccaagcttgcctgtcatgatctctcgagattcagctcaagggatgagaccataaaatctcttctgcccttccagggggatgtcaccctgtcagcgtcatcaaggaagctttaaaattttgtgtcttcctaaattaataatctctgagtggttttagttaggatttaatccagagggttggattattggtggaaaagagggaaactgaaagtgcttaaaatgcctcagtgctaaagaagaaggactcggtgtatagttttagtgaagacaagcactgtgcactcacgcctactgatggtaccaaacacagatccagaaaaaccctaaaataggaccctgaggcctggtcttccagggatgaggaggagaagacaaagaggatggataacaagtggagaaagacaggatttggtaactgataaagaaaacttactttcctttagattgtagggaggggagagttacagataagagatagaggtcacaggtaataatttagtaacaaagtaaactgtaaggcaaagctctttggtagctgatagggtttggatgttctgttccctccaaacctcatgttgaaatgtgacctccaatgttggaggtgggcctagtgggaggtgttcgtgggcctggatccctcatcaatggcttggtgctgtcctcacgataatgagtgagttctcattctgagttcatatgggatccggttgtttaaaagagcctggcacttcctccttctctctcttgctttctctctcaccaagtgacatgcctgctcccccttcactttccatcttgattgtcaacctcctgaggccctcaccagaagcagatgccagcaccatgcttcctgtacagcccgcagaactgtaagccaaaataaacctcttttatttataaaatacccagcttcaggtattctttcacagcgatgcaaatggactaatacagtgacaatgcatcctgacttacttacctggccacatttttctgttaagaatttctagtgacttttgaggaacagaaacatttttttaaattgtggaagtaattagccagagttaacttttatgtcccaatgaagaaagattcccaagctccaggtggcacaccacttatctttgaatagctttgagaaaaagaaatcatgccacaaaaacaatgtgattcattgattgtacttcagacagcaaagaaagttctagggtatgatttagaaagtgagcctgcaaaaactctttttcaagacaaataatgtaaaactaggttcactaggattgaggcattcattttacaaagaagtaattatgagtaattaaaatgtcatgcaccaatgatgattagtgacaattggcattgccacagtattaaaaaatacagaaattaattgaattaaatttactttagccagcacctcataagagtaaagtaaatggcctgtggcagatatgcatggccacagggtgtagcaagtaatttcttataggttttactaaatgtatttagtctagtcaatgatgttttattgagttttgaaaattttggatgtctagtgtttaacacaagactcatggttcaagatgactatatttcatatccatgtgaaacgtactagattttcaggaaagtccatgtattgtaattctaagaactcaaggctggcaccagctttaacggcggatggtgcaaactgctttagttactgtggcccttcctgtcaccacctttgcaaagtgctgccatggagaatgtccccactttgggcacgtttcctgtgatgctccaagtcccatctcattccaccagtcccaaattcccttctgagtaaaaggtagtatagagggttagcatcatttaagtctatccttatgccatgaaacacattttactgatgtgtttaatcagtggggttcccataagctggtctgcagtcaggtggatgtgtgtgtgtgtgtgtgtgtgtgtgtgtaggtgagttttcaccagtcatacctgagccccttgactgccatgtgatgagccttggcccttgcccctcagctgggcagcccaggctctgtggctcctggtcttgcctacacacctgggtagcccacaccctactttctccaggcctacaaaccccagctatagtgtctcagcttccctacctcctcttagaatattctgaattgaatgaattaagagactggcttccaattttgctaacatacttacctgaaactacattttgatcatgactgggtagaaaatgaacatttgggctccctgtcctgttgaactgttgaaatacaggcctaaattgagcaacattaatcaagatcacaattatatgcaaaacaatattatgaaataaaactttgttatagtagtcccccttatctgcaggggatatattccaaaaccactagtggatgcctgaaacttcagacagtaccgagccctatatacattactgttttttcctatacatagatacatatatagctatgataaagcttaatttatgaagtaggcatagtaaaagattaacgataactaataattaaatagaacaattataacaatctatgcactataataaaagttatatgaatgtggtctctcatttatttctgaggtttttcatttaatatttttgaacctcagttgaccataggtaactgaaacagtgaaaagtgaaactaggtaagcgaggactactgttttctttaattgtaaaagcagaaaaatgatatctttttatacttgtgttatatcagggaaaatttgtccattgtctttcttgcaaataactatgctttcctcttgacttttgggatattcaggtcttttctttcactaagtgatgttactagcagatggccctgctgtcttccgctctttagccatcatttttacccctagattacagaatgaacttccaacttttcctccgtctatcagttctcgaccagcattaaatgaatagttagatgtgtgatgagattagtgtttcactcccttgcctctcttccaatctcaggcttcccactaaacttagaactagacctaaactctctagtgtagccaataaggccaaatacaacctggcccctcctatagggttacatctcattattcacagtagttatgtttcataatgtcattgccaacattgaattagcaaatcctgaaccattgctccttggaaaaatactgagttacgtttctctgagcctagggtcacaacatttttgtcaactgatcaatacataaccttgttttgtgtgtgtttctgtttaaagacactttatttagcatagaaagttcatttattaactttggactcctggtcaacagcactataacttatacttgaacaaagcttatctaatacacatactttctacataaggcacatcacagccttcgtgcacttatgaacaccagacagcacttcggcactactcttcggggccattttaaacagtgacatcaaccaaaagcacaaaaatgtgaaaaatgcagtactaagcagacctcaaaaaggacacttgtgtatagtaagcaagtgaaaccagaaggcggggcattgtcttgttcaatctcaactggggacatgtgcatggggagacttcaaattttttgccagtctaagtctgcaagtgatagtgaaagcactgtgatgattgattttggggttataagtgaatttcagtgagtagcaaattcataaataaagagtaaagtttttctgactttatcttctacaaatatcctttgtgtttgctacactccagctatactggcctctatgcttctagtccatgtccagctcacttctgcctcagaggctttgcacttgctgttccccttgcctgggttataccctgcacaaaccccaatctaatccccagcatctatgacagagccagatgccgtaggcactcaatacatagttggtgaatgaatggcaattgttttcttaagatgtcatttcttgacaaaatagaaaacacaggcaactcttcgacagtactcaaaattcaggggaataatttacaggtctgtataatccccgaattgaagatccattgcttgtaaaaagcactctctacaaagctgcagcccatcatcttttcccatcatgttgggattttatttagtcacacagcctaacatgtcatcaataagtcaacagcagtgtctcacattggaagcatccctggaacagttagaagaagagaggctttaggcagttttacctgagtattgatacagattgctatcctcttaactacccgaataaagacactttcctttcatttaactaagttgatttgtactaacagaaagaatcattttgatgagttttggggagtgcttttggagaaagataaatgtaagaaaagttatgcagaagtaggctgcagggggctgctctggagaactggaattcagcctgagtctctgaactgcagtaggtgagaagagacgtgaaatataacacaggagaatagagagggcaaagggaagggcttcagaaaaagaatcctccccctttttacagttttgcccaaggctggacctgcctcattcattcttgatgtggcatcaatttgttaaaaacaaaccaacaaaaaacttccaggaaggaaggaagggagggagggagggagggagggagggaaaataacaactgaaaaacagttaggaaaaagagtttaataatttatcagataaataaaagatcaaagttgggaatctgtctggggtaggaatgcaggtatagctttctgctgagtaaattcagttctctcacagactcagccagacactgtctatactgtcccattcccagaaaacactgactttggccacagtttagctccccttacagcaaagcagcaaagtctatattcaagccccaccttgcccttccttccaggggacctgcattattcctatcaaacccaaactgttctctctgtggctggggacagccttcactggttagcacagtttttaatatgaatccaaccttctcacttctcttttgagctttcttgtgtctcagctctagcatggagagcacttacagaatatccccctaaatgggaacatctggtttgccaaagaggtgacctcatacatgagcctcttgaaagcccatgagcctgagtcttgtaatggggaatgtttatccgccaggtatgaaagatgaaatgagggctccaggaatttcgtcttaacttgcaagggaggaggatcttttgttcaggtgctgaacagtgaagattttcaagttttcttaggaacacaaaagtgtttgctgtcaggagaactatgttgttttccttgagggcttctctgtacacaatggaagcagagaaaccaaactaatcctggtccctcctgttggcttctttcaaaattttgagttgtttccagtccaaaccagactggcccaggcttccgtttaaaaataatccacttaccacagcattcaaagcaatttggcaagcctaggaagaagtgtgacaggaggacgggtgggttggttgcgggaggcaaggcaaggaatccatttttgtgtaccctctccacgtggtgcaggcgctgtgccggccacttaacacgctgagcccagggcctattgagaagagtccagtgctgtgaatgagcatccctcaggctcccaagctggctggtttgaaatctgtgtctcccttgactatcatgagcaaagataccaagtaagtgccatctctgacagggcaaagctgagaaaacattacaacaaaaacacgatcattccttaaacttcaaatcatagaaaaaaatgaagagaaattctggtgttcagctatcagtaaacaaacatcttgtaaatatttacgagtgggcttgatattataagttgttgtttaggaaggaggtcgataaaggggaccaaggttagccagcagtagaacagataggaaagtctcacgatcctaggtgccctttgacttagggtgcctacactaaaaggaacacaaagacaggccatatgcccatcttttccccatcctagactttgtgatctggtccacagccctcatttcacaactgaaaaatcagagggtcctgagaacttcagtggtttccctggaatagtgcagtccattggggagccaggacctgggtctggtcttctaatgtatttttctttctccttcccactgctgatttgggggcaaaccatctgattgaaggcatgatgatgatgaggagaggcacagaagccttgagctctcctctgtcctcaaggcgtgtggcacagcttgtgctaaaatggaacagtggacctaatactactgcttgtataatggatttttgcatggcataacttttgcattcactttgtgtgcagcatatatgttttttcaactctctccgaatgttgttccatagtatacttatatggtccctgagaccgaaataattgctcctctccaagactataaaatcctcaaggccaagacctaccccctctacattgctgactcacccccatcccaaaaatgtaaagcaatccgcaaatatttagttaatgcttgaagaactgactgcagttggcatcatgctggtgacttggggacacagaaaggccctgttatttaatttagagggtgaaagatgatattatttgttcacaattctcctttccctcctactcctgctggtgggaaaagtctataccacctcccagctatgctgactgtagggtttgccatgggactgtcactgaacacagaaacatgagcagaagtaatggtgtgccagccactggcagagcctttctgctgcccctcttgtggccctgcctccaccttgagaacctcgtgcccctgaacagtagtggggctgccactggagtctgggcactgggacaagaagatcagagaagcagaccccagcccatcctgaagcctggagtcaagcccagccacacacagcagggacccagtggagccacagctgacacacaggactatgaatgaggaataaatgttgaatactgtaagccacttaattttttcctgggttgttaccacagtaaaagctaatatatggaatctctcttaaaagcacatttgccatagagctgaagtgctgtgaaccaatttggtcacacaaaatatttagattctttttggcagatactgaagcagtttgaccttgctactgagttataatgaaagcaatcctcagaccagatttccctacacatatgtgaacatttattaaataaatatgtgttaatgcaggcataaaaatggaccttactacctgctgtcccagctcaggaaagtcccagctctctgtccctttagtgtctcacccaccatctttactgaaaggtttcctagaagcagacgctaaacatctcagaggcaggattgtaccctttttgtaggcattgggcaattaaaactctttgtagcaatgcctggacaacagacttataggaatcaagattcaggtgacatccctaaaggagtaagccacgggtcttgctggattcttaagccctgttcaggaaaccatggtgaatatctctagcatgtagacagcagagatacaagttgagaccagttacagaccttgtcatggagaagtttacagagttgagcaggggcttttggagccaaggttagggttcgtcatgggctttagttgtctgagaacaccctaaaaatcaagggatgtgtgtgcatgtgtatgcaatgttgtaggaaaaggtctacattgttcatcagatttctaaaggagcccatgacttaaaaagggcaaagaaatgctttcccatgggatctgtaagagatgactctataacaaatgcatttactcagactttgctatgaaggatcaaactattgactatataagaatagacttctagccaaatgaccaaaaaaggttcttacacataataactatggtagttaagaggttattttaaaaatgtcctaacagaactaatgactaataaaaatggtactagacatgttccaatgaaggaaactccatgctgcaccattataaaagtcaatcatagactcagcaaagcaaaggctcaaggttgctttgatatgcaacaatgcccacagggtaatagtagcaactcccaagtctcattttaatcacgatttgcctctccgtgccaagtatgaagtagaatgggaagaatttacagccatgatttaaccatctactacacattgctggttccgttacttagaatagacatcacacgtaagataataaacatacaggtagcagggacatttccccctcaaactgtccaagactgttcaacaaagagcatagctgatgtcaatgaaattcatggcccaagaagtcatgtgttattcatcacgcggttttcatagcccctgctacatccctacacatcccagtttaagaagcacaggcttcacttctctgaggtttagtttcctccatatactaaatgggaataatcatacttacatcaaagggttcttaggaaaattaattgtcatgtattggttcaatcctataacatagctatgctgcctagtacctagcaggtactcaacaaatattaaaacctacctccattcccacttgctatgcagctctgtgcttctcagagtggtctccagagctgcagcatcgcagggagcttcttagaaatgcaaattctcaggcccaccctagacttacagcttcagaaattcagggggtgaagtccaatgaagtatgttttaataagtcttctgcgtgattctgatacatcctaaatttaaaaccactgatgtagataaatcattcttaaccatggctgtacattaaaatcatgttagatgcttttaaaaactactgatacttaaactctctaaccaccccaagactacaacagaatctctatggggtgagggactgggagcattggtcattatcaacagttccccagggatttaaataattgaatttaaagggccaagggaagtccacttctctcctcttggcagtctgcactggatgcttgaaatccaatcaatattgagtctcttctgaactcagacctgccacaccagtaactagctgtggggccttggaaaagtttcctatacttctgttagccttgttttgtcacttataaaatgaggatcataatgatccatcttgcatcttcttattttccaatgggaacgctgaattccaaagtttttgttccttgcccatgtcacatatagcagtagtagcagaccagggcccagcctttgccatgtcctcttctgcagagagtcatgtgtatgggtgtgggacagagaaacatctggagccctggtgtgggcgttggtaaactttataatatttttggcataagtatcggaagggagggcttccagctaatgactggagaatgtgccactaagaaaggtgagtgaaggacttgcaggactcagtggaagctgtgtgggatgaggagaaggatctgcagcaggacaaggaatcaccgatgagcgtacacaaggataaatacaccattcattttccactggggctggtggaggggcaggcagctttggttaggatacgtggagactttgagatttcagagtaaaattgggaacagggcttggaaaagctagcagcagcatgaaactgaacggaaaacagggagggtgcggatatctttgtgtactctgctctgattgggagggagaaaggggagacccagggatgatttagccatttctcttgcttgggaagggtggcataagcccaacaattcacaagcccaacagtgtggaaatgcagaaaggaagtatttagctctagcaaaattcgactttgggtttattgaatctattatctttatttttcttctccttcccatgatccctccccatgatgtacacacacttaagaatcaccatgtctgctaggtgagaatgattactgtcatctgagaagaggcttcaaactaagcttcactgttcctccctctaactcctgttcatctgcatatcagggataaaatgaaggggaggaggcagctagctctgccctgcagccccctgatggtcacagtagtcactgctttggagtgaatgcctacgtactccccggattttatatgttgaaattctagcccccatggtgatgttattgggaggtggggcctttgggaggtgattagctcgcgaggatagagccctcatgaatgggtttagtgtccttatagaaagggaccgcagagagccctctctttttctgccatgcggggataatgaaagcagccatctgcaacctcgaagaggtccttaccagaacctgaccgtgctggccctgatcttggacttccagactccaaaactgtgagaaataagtttgcatttttataagctacccagtgtatggtactttattacagcagcccagaataagacagtcaccatgtgcagtgtgggtgcgaggctctgccccacattttctttcctgattctgaatttcttattctgaccttggccttcagactcacaaggctcaggtctctcattaatgtgctgagatgactcttcccaccttctgccattcactattgaccaggaatgacctctactgtggtgactttgaaggcaacaagacaaaatcaattaactggacaaaagtgaagaccttaactttttcctgtaattattataaaccagaaggaactctagaagtatgatttttatcccaagcattctaaaactttattggcaacttttaaatcagtatcacagaggctttaaagccatttacactagaaaactggcttttatgtcaaatatttatttaaaaaacctctgtagttgtaatcctcaaactatgactcactttatctaaagaaacatttgagatttcaaaattctggcacaaacaaataaatatcttgggtacctaccaccttgaagtgtactacaatggtttaccttctgcagggagggaggaaggagagggagctgagaaaaaatttgaagaaagcaaatatgagagtcctgtgagcccagaaggcatatcatgggccaaagcctgcaggtctggcctgcctggagcaaacatgcagagcccaccaagttcaagtagaagctgagctcagcatgtgggtggggaggcacagtgggaagagacagtgcaagtgtcagagcacaggcccaagccaggcacacagctataggcacatggggactagtatgcaaactggaagactggaaaaggatccaggaaggaagtattaggagaggtcaatcttctagcaacattgtaaatggcttctttagcttcagctgttaggacccagaggcatgggctggtcccctaaatctagccagattgtaatgcacacagattgcaaacagaagtagtgagctaggctaatgctagccctcaaatgtgttgtgattggcctgtacagagtttaaaaggaatgaactgataagatcagtgtatcatatcagtgtcaatgtcctagtggtgatatactatagttatatgtgatgttatcattaggggaaggagggaagggtgcctggcatctttctgtattatttctcacaactgcatgcaaatctacaatgatctcaaaaccaggtaaaaaaaaaaaatttaatgagctaaactttataaatcagaagatgtcacattttttaaaaaacctcattttccagcttctcttgagaagttggaagatccggcaacaccaggcccaccctgtgttcccacaataacatgttctcccgtaacaatcagaagaagcagagaagcatctgatgccttcagacaggcattacaatcttcattttgcccccttctccatccagcctgcttcactatttatgttatttgtctggtcccaatggacattagatttttctgtttttctatatagagggacggagttaaagacttggccgtccaagaggtcatctgagttcacacaatttgtctggagttgaacactacatcatgaataagaacacaaggacatctcactatcctggtgcccttggggccttgcacataataggtatcattatagtattctcctacagtagaagaaccacttaggatgggttccaagaaaaatcaatgacatactaaatgtcacgccacagcaatttctgtcataactcaggagccacataaaatacagtgagttcttaaagtcataaatactctgaaattatttatgaaacaggtattaggtaaggtccaatataccaaaattggaaatacctagacacaaggtttaactggaactctccatatatgtgtgctctatgattccaagacaaggtgccattccaaatggagtctgtcttttcgttttctgaggttaaaacattttccacattagaaacctgtcccctttggtttccacatggtaaattactctagtggaatcatttaccctaaaggcaatgcagtgttcccattatcactaagcagcaaagggcaaaatagccaatgggacggagacagggaggataaattcaggtcattcttgttgcaccaaaaaaaagcaactcacattactcaaaaaaaagcattatattgactcacagatttagatacatctctgtagttatgaaatgatactttttacaacctttagtctgctcaatatatggtccaacctccttacaccacctctcactatgcacattcttacacatcatactcaggagttggcatttttcctggttaggccattctaatagtggtgctttctctgaattttactatgaaaattagattttcctcccaaggagtctatgaagggtggaatattatagcacacaaactaataatacggagaaagcatggtatttttacgtattccttaacacatgagttaacttatcaggagagttaaattacatttaaaattcaggggcagatgtaggtcctggctaatggtcccttcagtggcctgagataaggattcactgacagggttctctcaatcccgccctagtgttgaactttgacctgcaatatgctcactctatgcttagctgttttacaaattggtaaatacacaggccaagcggctgctgtccattatgtctcagattgattcagtttggttactcaggttagctcaaccccattgcccccgctgatgctgcctcagttcacactggccgaaatggacttattcatgttgccatttgtaccatgtcatggccaaagaaattatatcctggaaattccttgcaaaatgcctgcagtctgagatttggctgttgccagtggccactaatctgaccacagtcatgcatctggaaaattaaattattaatgtgagatacttactctactgtattgaaagtaatggctgtgacatccaagccaaatcatttcatatgaaacacggaactggtttgctctgtgtggggcatcagctggactctgctataaggcatctggtgacgccatgagtcctctccaagttttctgctgcaagcctgtgatagccagctggcagagcagctgcaggcccaggtcactttgggagccagctgaccatactcccttagataatacatgtataggtcaaaggaggctctggctctcactttgaacaagtgtgtttggtcaccaggggttccactgaccactgggctgcagaacgtgcaaataatttgcagcttccttaattaagctaaactccaatccccaacatagagcttgacctcaaagtgctatttttatttcttattcaaatgcactgttgcaaccacacatcccctatctgtatcaaagtctctctttgtgaggcttttgaaaacaactattttctctttccattttttgaaatgatacatttattttgaatagctgtagagttacagatatatggacagagatcaaatgcggttttgattcccagagatgagtttatctgagcaaaagtaaaacacattgtgagtggtagatcataaacaacttgtttggattttggtgaaataagtgtgttagaccagtagtcacatggaataaaatatttctgatgttcatttagtgatgtttctctttgttactgagatatgtcaagtttctgtttggctctgataaacgtcaggtctctcctacctcttcatagtttggcagcttattatacattaaacaaatatctagaaaacacctcctctatgccaggcgctctgtggagctctgggtgtaatcagcactaagatagatgaagacctttccttcagagaataaaactagtggaaattccactctagtcatcctttcctagcaaaaacatgtgtcccgttttccagattccaagagatgggaaatttcccacatgggcttaatagagataccctttggatttgttttttagaaatcatttatcaatgtatagggatgaaaatgacatttttctggaacaactttttcacattcagaaaactaccttcatgatttctgagaacctgacagccataaaagagaaaaaatgctgtttctctgtgctctttgtaaaaaggatcacagcaaatggaaacttcaggcttcttggaaaggctctagttctgaaagattagggtttacactctactgttaaactagactttcagagatgagggctaatgctcaacttggcattggaaataatctgctttggcattatgcaaaaaaaaaaaaaagttaggttcacattgtactgaaatagccaccacctgtggaatttttagaggctgtttttgtttttatcatgtcaaagcatttctactcagctcagactcaccattccgagcttaggatgagaggcagctcatgcccctggaccaaatgagtttatcctggagaaaactctagttccaaagcaacatgcaacttcctcgaggtttggaaaaagaggcttccaagtgtagcatctttttattttataaaactcctttccctgccaaacatttggtcttgcacgcatctgagggtggggcaatgcttagaatgagagtgagaaacacaagatttagtaaaagcgttgccagatactctgcttttgaaatgttgcttaaaataaaaaaacacttttctccttactctttgatatgaataatgaaaatatctttcttttttgccctggaaagtatgttaaaaaaaaaaaaaaaaggcagtgttttgtttgtttctttcttttaaggaccacaggcaactcttccatttgactcatttggctatttttgattattggcccccgacacgtggaacattgttcagatcagtcctagagggcccagaatggccagctctctcagtatctcatttttggcaattcaaagcgcaatttcccattaaccccgattgcctccttcacacccctggaagacatgcacttctctcctactaggtgagcccacagcactcctaaagactgcgcagcctggaatcgaccccaggcccactttcccaggtttattttgcgagcacagtgggtcagtctggcaagtgaccgtgaactgccagagcagtggcaggtgtccttcccagcagagagctgtcgaggtgcacaatgtgggaaatatgctaatccaaggggttgggatgggagccccaggctttgttacctctcagttgagaggcctcagtgagcttttgacaagatggagctattgtcctcctgggcctccaacaggatgattcagaggagaaccacagtgtagatcaaaggatggaacaacaggacctgggagcaaaggctaaatagccctggtattattttgcctggagaagagaaggctggaggtggggtgggtcaagtaggccataatggtgaaaaagctattatgtcgtgaatgtgaccagctgtccgacattttgagtgagaagaaaaggcgtaggagaaaatgaatgtaaactgcaatgtgagaaatttggttgacataaggaaaacatttcaaacagggagcgttgttagacgctaaagttagtgacagagggaatacgtttcttagatgaactttaaagctgtgatttttcagtcaagaggtttgaaggcaaacttgctcggatgtagggagtcaataggaaaaaatgttgagacccacttcacttaaatatgtgcaacatatgatttaagcctttgcaaactgctctttacaacggatattttctcagaggctagcatcagaagctgctacacaggacttctttgaccttgctttaatgatttacttagctgagacaggaattgtctttgtggctaagtgattgacaagtaccttgggtgatgggcattctgattccagttctgcagctaaacaactctgagacttccaacaagcacagaacctcaatttccttaactgtcaaacagagacaatagctctgttctacctcataggatggcttggaggaacaaattataaaaggaataaaaagcacactgtacccaagtatgtagtaattagactgttcagacctcagggctactcccaaatacaaaagtgcttggctctcttagcattgttttaaaaagttactccccaaccagactaggagtgagaaaagagaaggatcaggggacaaacggaggattcaagaacagagttcaagatggtatgggggctgttattttattcttgcctctcccaggtctacagcccaacatcaagcaaaactgggtggtatataccagtgcaaggcaaacacccagttctttgattaaactgtgacctctgcagtttgggtcatttcaattggaaacgtttctccatgaaatcttcaaataacagaactagaaaactccattgccgttagtgtttctaataggtcagtcttaaagaacttttgaaataaacaaataaataaacctcagtgtttcaacacagtgataaagtgatggaattttttacccttagtgtgggttcagaccgagggcatattgagtcacaatgaaagaaaaaaagccttctacagagaaaattcttttaaaaatgaaggcaaactcaaaagaccttttcagataaaggctgagaggttgtgtcccaagcagatttgcactacaagacatgtaaaggaggctgtttagagcacgcctgcttcttaaggttgtagtcagttggaactctgttcttctgtccctaatgcttctgtgctgctgcaatcagagacggaaccctcaactgtggcagtcatgccactctagaatgttcaaggtaaaaaggaccatgtgagcacattttaccaaattcctttattttccaaataagaaatagatggtccaagaaatagaaacaaagagtaatggaattagtagggagacaatattggaatttgtccccaaatcttgtggttgcccagtgatatgatttatcccactggaaaggccacagactgatctctaatggggtaaatatggttcacaggcatatttcatttggcccacaaagtggattttttaaaataattttaaatttgttatcttgaaaaactagaagacatggttaggtgagccatgtacctacatggaacataattataagtacatgagcctacagctggagttccaatgtttccttccctttttagatgaaaagtactcttttgtttgccacattcattaccactccctaacgtctccctgatgatgaagccataggtgatttagaacgtatctccatactcacacagatgctctcttaaccatccatttcactcatttgtatgattttcctgggctatttacacatttaattttgcaaacccttccctaccacatgctgcttctattttcctactcagcaaaatcattcacaattattcctgcaaagaacaaagaaacaaaaaaacataatgaccacatgcatatatgacatacctctgatcctgtagtgataatgtgtatagccctggagacatacacgcattcacaaagcagttcaagagactggtttattttactcacttttgcataagactctaaacattgctgaagacccacttttgtattccagtattctgaaggaaagtgatgaccatgttgacatttctgtccatttctgctgagtaaaagggggcctcccctcatactctctactgtgttttctaatatcttttagggaagatggggtaagagaatctattagttttaagacactattaaaaagatagacacatttgtccacccaaaaatgtgtacatgaattttatagtagcattatttataatagccaaaatgtagaaacctagatttccatcaatgataaaagaagtattctatacttgtacaatggggtattatttggcaattaaaaaatgaagcactgatgtatactacagcatggagaaatcctgaaaatattatggtaagtgaaagaaacgagttgcaagccactacatattgtacaatccatttatacgaaatgtccagaataggcaaattccaaacagccagattattgccagctaggctagggctgggacattgggaggacatgagaaataactgatactggttatgaggtttcttttttcagtgatgaaaacaacctaaactggattgtggtgatgggtgcacaactctgagaatagtacactttaatgggtggaaagtatgtatgtaaattatatctcaataaaaatgttacttcaaaaagataaaataggataaggcttttgaaatcaggaaaagggaaataatatttttgggtgagctgctacgggccaggtagagtctgatgtgtttttttatatattttattcaagcctcacagcaaaccgccaggaggttttattctgtccatttcacagatgaagaaataaaggctcacagagattaggctgccttacctcgtcacttgcgaagctgagttctgaaccagatttgactctcaaacagcctgcctcgccccactgctgctcagcagtcacgcagcgttttctccttctctaaagacaaggaactaatagagacttgcctccactggttcttattgcctcatgtgactatttaatgatgagcaggataccaactcttctttcctaaagagctaccctgagccatgccagctgactaaacagtctttctaaagtcaaatggggcctttttttctcaaggtgacatgagtgcttttctaaatgcagagctagactcgcctaaaacaattctctgtctgctgtctgttggcattttctcatttacccaatatcctccttgaactcacctctgcttgctccctcattccacattacagctaaaaacattgtctaatgcagttttccctccctaccccacccctgcctatataaagcagcatccaggtagcagtgaacatgtttacgcctcctaattcttttgttacacatgtctctaatcattaacatcgaatagtgcttacaaattaattcatatgtacaaattcctcacctgagcattcaaaatgcatgaatcagcatccagccccaatcactttaagaggttacattaaagcacagatcattagggagcatggataaggtgaggagaagggagagagattcaaatagaattcatgttccttgccttaaatgaggatcagtctgagctatatacaagtgggcagccagcagagagcgtctgggatacaagccatctccaagccacaggcacagcctgcgtttactcacatcacaatccattatcttcccagccaggatccaaatcttacctctactgaagcaagagccaaccagtgacctcagctgggtcatcaggaccactgtagccacttccagcctcagctctctgatctgacagcctcagtcagcccttactttcctctttctgaacagggccagtgtgcttcctcctgtctgtcaatatttaactacgctgtcaagtcacattacatcacctgcactaaatcccacccagtgatagctagagggtgtgcctgctctattcaattcaactcagctaacctttatctagtgccttccactcattcatttctttccacatgtactcagcacctactgcatttggcattggggatagagaactgaaagatccactccccagattctagtggaggaaacagacaaaataatgtggtatgtgctattgtgctagagcacagagtgcaggggacactcccattccaggctggctggggaggtatggagcaaacaaagccagagaattcccaaagatggcaacacttagagtgacatctctaatggaccaggctatatcaggaagacaaaaggatgatgcatacatggcctctgtcctcaaggagcttactcccagcacaggttgctctatgttcctacagatgaacaggattgcttacataaatgccacggcaaagtgcagaatattaaatcaaagagggcagccctttcttgttgttgttgtttttttgttttttggtaagttgtgtcctgaacaaagatgtctcaacagtgaaagctggctgtatcctatagatcccttggtgctacaaatcgagggggattcttccaagagccgagagagcagataaacccagtgaataaaggaagtgtctgtgacccattttcaggaccaagaaaagaagaattcaggtcacagagtaacatttttctctggtcaaaggaattaatctggtacaaacaggcttggccaaaggtaaacagggatctctcacatgccctcctaatctctctatgacttttctaaggcaacatttcctgacacttaatgaagtgttgatggctcttttaaataatagagatagatatgcagaaccacttggcatcactaaaactgcagcctttaacttcgtctgtgatcagaagcctcaaaagctattcactttgggattttttttaaggttgaatttaccaccaaagcatggctctcaaatgtacccatgcaatcccttttctaccaaaacttactgcagtttcatgcaccagagaacaaagacccccatttatgtgtgaacattcaaaggaccccaccaccgggaagcctaagaggctgccacggaaagtcccggtatatttgaattgcaaaacacagcctggggatctcaatacatctaatttgggacatgttccaagctcaggagcctctctgcatggaagcagctttattagtcactttctcagacaattttctagttccacatgcacacttccccaagtgtttccaagacgaacatttacagtctgttgcaatattttactacaaggtatttagggttttgacaaatactaactgacattgccaccattccagtgaaaactgatgacccatagctaatgcctgcttcttggttgtggctcaagaccgttttgagccagtcagtgattgtaagcagaatgacactccagacctctccttcacatcctggaagcacagtttgatttcagcccattaatacattcgcattgaatgttgaatcgtcatgaaactgaagtgaagtgaagctgcacctcagtcaagcctgttctttttttttaaaccaagacttattcagaaccctttttgcttactaacatataacacacttggcattaggaatattatatgttattaattggggaattgttactactaattgccaaatgcccagggacttctggatccaattagaatggatgtttgacatttatcttgcaatcccactagaaggacaaggtgctatgtgacctttagttggtttttaaaggcagttttagtaaattttagcccacatgaagtaaatttttcaaataatattatgcatgtcgtgactggtgagataactatcagctcatggaaaataactagcaaatacaactaacatttccagaagtaaaccataagaaacttcaactttcaaaagagaatatttaaaatgaattctatttatctcttgtgtactcagctttacaaaatacaagaaagggaaggtttttgtttgtttgcattttgttttcaataagaagtcttaaagagaagttctaaagcaagactaatttctccaaatccaattgaataatattcatccaagttagaaagcaactggtattgtgcactcatcatggcagaaaagtatagatagagaacttgaagccacagttaatttaatgtgaccctgggcaagtcaatcccataattagggtctaaacctgctctactgaaactaaagtgatggattgtttaaggtacacaccaaaactcataggtgtcagggagtactgtgccttttaaacccatagttatagggttaagaccctataacttgtccagggtcacaaaagagtccttctcaggctgctgttaatgctctcaattttctcaggcctcagaggtttcccaatcagtgtgactgtcagtgccaacaccagaaaagtccctggccgaccaagatggccacccaacttgctactactcagataatgtcggaacaccatcttggaagtgatttcatattatatgataaataattacgcatcttgtctgagccagcaagttctgattctttaaaattcagttgactttttgaaatagctatcatttgtagccaggcttaatagatgagttttcaaggtgagtaaaaattgtgatgtgaaaaataaaatgttttcattaagtatagagatttgactttttgtgtggggttcagaaactaaacccaaaacaaaaatgtaaaaacctagaaggattttacttgctactttgccttgctactcatggtgtggtctgtagggctagcaatgtagcctcattaggaacgtgttagaagtagacgaacctggttgccctaaatctcctgaatcagaatctgcatttctacaaaatccctagtggttctgaggcacgtgacagtttgaggagtcctgttttagaatttgtttaagcctaggggaagggcaaaccagcctccataaaaacacttgatacagtcataaataaaaaacagtcttgcaattcaaagcattttgacaaaaaaaatgaaaggcattgttgtaattgatgttttctgggccttgtgaattttaacttcagagctgagaaggccataaaatatagttaaactctaaatgaggccaatgattaaatggttttcctacaagggagccttgttggatgccagggcccacttcaaagagtggagcagtcagtctgcgggaattcccctctatgcacagttagtcaccaacctctgttccaaacatctccctggttaggggatcaaacccagggtgttgcctaggttttaatggtttacatctgaaacattatcgcacaggtgaagaatggggatagagggaatttctaacatacagattgagaggactattttgactgtgagatttgagaagtctaataaacacctatgtggagaagaaactggtatttgaacataggagtctgaggcagagccagtcagaaaacagtatgtacgtgaaacatccttggaaagtaatcaggggggtagtcagcttatggattatatcagaaaatgagggaataaaagattacaattatagggagagcatttcaggcctagataacactggaaacagatgccctgtggcaaaagggaaaaagagggcagagcaaaagaaagataaaaagaagtgacaagcaaaaattactagatgataaagtgaaatcaaaatgaatgacaataacatatagagaactgcaatagtatgaaggttaaaaagttttccttcctaaaacagaagatgcatattattgtgggaaatacaaaaagagtctgaaaccaaattctaaatatttcaaatggggagtcagaagaggactgagcacagagtttgtatttgcatgtaaatggatatttggtatgctaaacagaaaatgcacagtcttcttttatgcttatgggataaaaattcacagaaaataattatgcatgtggccacaaagaaaacactgaaaattccctgaagtgaacgaggaaaaggcaaaaaacacaaaaactctcaagtgcctttaaattaaaaaacagtcttctaaccaaaccaaggatagaaaatgcaggccaggcacggtggctcatgcctgtaatcccagcactttgggaggccaaggcgggaggatcacgaggtcaggagttcaagaccagcctggccaacatggtgaaaccccatctccactaaaaatacaaaaattagctggacgtggtggtgcgtgcctgtaatcccagctacttgggaggctgaggcaggagaatagcttgaacccaggaggcggaggttgtggtgaggcgaagtcacaccattacactccagcctgggcaacggagccaaacttcatctcaaaaaaaaaagttcaagttatttagacataaatacaacaatggagaacacctcatatcaaaactgtgatgcagtaaaatccagaggaaaatatatagccttaaatgcttttatttaaaaaaaaaagatagaaaataaatgcattacacattcagccttcttaaagtcttccaaaaaaaaaaaaaaaaagacatagaggggctatttccaaatttattttaagaagccagcatcatctaataccaaaatcagatacagacactataagaaaactgcaggctaatatctctgatgaacatggatgtaataatcctcaacaaagtattagccaaataattcaacaacacatcaaaaagattataccttgtgaccaagcaggatttatcccagggatgcaaaaatggttctaacgatcataccttattcaagtatggaaattcaaataaagtatgatctttagttaataagagtgtatcattaattgtgaccagtgtaccatactaatgtaagatgttaataataggagaaactagatgagaggtatatgggaactctgtactatctttccattttttttctgtaaatctcaagctgttctaaaaccacacaaaagtctattttaaatttttaaaataagtagataatttctgatggtgatatacagaacataaagtagtgtaatgcagtacaatgttctgggattgggagggtagccaggaaaggcggtcagcaaattttccctgcagcatttgagctgagagtttttcataatgcagtagggagagccatgcaaaaatctcagggaagatattctagcacaggcacaacatcaaaacacaaaagcaacaaagaatcaattaaactgaaagctggttatttgaaaagacaaataaaacaggtaactctctgtcattctgattaaggagcaaacataaaagcatacaacataaagactaagataacagacataaatgagtaggaagacaatttgaaaaatgataagactatgtgagtgacactgcatttgaaaatgggtattttttaagcaaaacattaatgactgaaattaatacaagaagtatgagacagaagtacacaaaagaaggtaaggtaataaaactgtcactaaaatgttatagttttaaaataggcaaatatagcatgacagtctgattttatttaaattttaagaaatagataattcccatataatttaatttgtcccagaaaagagcaaaatataaacattttcataattaactttactgagccagcagatccttagcacagataaagaaactctgataaaactagcacagaaaaagaaattctaatttcagttgtaaaattaaatagaaacattttaaatagaatgttagcaaattgtattcagccttgtaagaaaatcacaatgcaatgtgagaaaatcacatatgatatgaccgagcacagtttattttagtgatataaaaatatgttagcattaaaaaatctatcaattaaatttcttatattaatacatcaagatcactggaaataagatacatataaaaggttatcatgcttatttatactatatagtaacagaaaagaaaattaaaagcaaaatcctgaaattctgatgcatctaggaataaattttacccagatagttcaaagaagacctatatgaggaaaatgtttaaaacttgcatatgaattaacagtagaaataaatgtatatttggatacaggtattatcataaaagtgatgattgttcccaaagtaatacataagtgatataattctaataagaattacaacaggattatttttgaaagaacgggcactaggcaaaagtcactctacagttcatgtggaagaataactattcaagaatattcacaaacctttaaggaagctttgtcctacaagatattaaaacacactttgaaatactatcaccaaaacagtagctaattgctactagtgcagggaaaataaatcactggcacagaataagaagtctagaaccatgtccagaaacagtgccagaaacttaattatgataatattaataaaattttgataaaactaatatttcagatgagtaagaaaatcatgttaatcagtaagttacattattcggtaaattatatgagggtatttgctttgtaggtggaagaacatttcattagaaccctattttacacaatgtgcaaaacccattcttgagggatttaagttagaagtgcaaaacaaaaccctgaaaagcaagagcattgtgaaacaatatattaaattacttttataaactcggagtaaaagagataagatattcaactcagaagccataaagggaaaaatagacataatttacataactcatcacgtgtttacacaaagatactatgaaccaagctaaaacacccaaaatatttccaatttgcactagaaacagactccggtagaaaaatgggcaaagaatacaaacacacaatttataaaagactgcaactggacaatacgtatttgaaaatataggctactatagtcagtcaactacaaattgaacaatattttacctattagattgaccaaaattataaatactaatagtatctaaatgttattaaaagtgttgggaactaggcagttgaatacactgttggagaaagaatgaagttcctataatttttttagaaattaatttggcaatattaatttaaaatgtacatatgattggaccagcagtcacttttaggaatctctcctgtgaaaataaatgcaagaccacataggatttatgccctctgcgggacggttataacagcacaacactggaaagattctgaataaccaccagtgggtggacagttgcagaaattatgccatgtggaatattatacaggagttacaaagggtaaggccattctaaatacagtgcctcagaagaaggttcatgataagatgttatgttaaaaaagcaagtaaaaacaacagtattagatgattttgctttgctttgttttaatttggagctacttttttttaatttccatttttattttggattcatgcagtacatgtgcaggtttgtcacaagggtatattgtgtggtgctgaggtttgagattctaatgatcctatcaccccaatagtgaatatagtaaccaataaaaagttttacagtccttccccctcttcatccctccatttttagtccttgcctccctccctccttcaaggtctactgttcccagctgtatgtctgtgtgccccccagatttagcttcaacttataaatgaaaatatgcactatttgttttctttttctgtgttagttcacttaggataatggactccagttgcatccatgttgctacaagggacataattttattttttatggctgcatagtattccacggtgtttatgtaccacattttatttacccaatccaccgttgatgggcacctaggttgattccatgtcttagctactgtgaatagtgctatgatgaacacatggcaatacagtgcatgtatctttttggtagaacgatttcttttcctttaggtatatacccaataatgggattgctgggtcaaatggcaattgtatttttagttctttcagaactctccaaactgctttccacaggggctgaactaatttgcattcccactaacagtgtataagtgttccctttttctccacaacctcaccaatatctgttattttttaactttttaataatagctattttgactgatgtgagatggtatctcattgtggttttgatttccatctctctgactagtgatgttgagtattgtttcatatgtttgtcggctgcttctatgtcttgttttgagaaataactgttcatgtcctttgctcttcttgattttttaatttttgtgggtacatagtaggtatatacaattatctttgcccactttttaataaatttgttttttcttgttgactcatttaagtttcttgtagattctgaatattagtcctttcttggatgcatagtttgcaaatattttctcccaatgtgtagtttgtctgtttactctgttgagagtttcttttgctgtacagaagctctttagtttaattaagtctcatttgtctcctttggttttgttgcttttgtttttggagtcttcatcataaattctttgcctaagccaatgacgtgaagagtatttcctaggttttcttctggcatttttataatttgcggtcatacgtttcagtctttaatccatcttgagttaatttttacatatgatgagaggtaggggtccagtttcattcttctgcatatacttagccagtttttccagcaccatttattgaatagggagtcctttccccattgcttattattgttgactgttgaagatgagttagtcatgagtgtagagctttatttcagtgttctctattctgttccattggtctatatgtctatttttgtaccagcaccaactgtgtatgtgcatggttgttgatacatgaataaaaaatctcccaaatgggtataatctgagagttatcactgggtccttaaggtggattaaatagtgggggtgggggtggagagggagaaggaaggaggagtgagggaagcctattcttcctttctacaggtctgaaattgttaaattgatatcatcaggaagccaaaattttgaccttataaatcatatactaggagaaagggggaaaaagaaagagaaagaaaaagaaagacagagagagagacagagagttttctagctacacaatgttttcatttttcatggaaataaagcttcatttcatttctagggtcatttttccaaagttcaaggaaatataacatgaattcaggtttccagttccagaccatgtgctgatgagacagataggaaactagcactgcatttaaaaatacttcagaatattgaataataattcccctgaaagcaaatacccacagaatgctgctttcctgccaggttggtcagtcatactctccatgttttatatatttaaactggccatttcaagttgtcttcagatgtgtaacctacttcctgtacagaattaattactgtatgttgatacaacattttaatcaccacccactctggacttttagaggtagaagaggagagaggtgtagacaaccgtttccaaggtatacagcttggaggccctgaaggctttttctttgatgtgaactttctgtttcactgactcattcttggagaaaacattccgaagttgtcgaagagggcagctgggatctctgcagctgtaagcatgaatatgtagctttacgatgcttgcacagatactgaggcacaaagaaccaggataatctgcttgaggagtggcctttttgatggcagaacaaggtttttgtttatttgtaggaggcatattttatttgtagcaatcatacctatacttcagaagcaaatccttcttcataataccatcatcaaagatgggcaaagcaatgatgctgataaagaagtaaggaaaaacacaacttcttttatcactaaaataagaaacaaacaataagttttacttggattgaggaaaggaatcaaatccatttacatgagtataaaggttcaagaactgaagggtggttactgatttataactttgtaaaattgcccatggaagagagggtcccatttagaagaaataaatttgtttctctctgaaatagacacattcaccaaacacatggatccgataaataccaaatcatggaattgatcattatatcattccttaacctttgcttcaacagccacaaatcaggtcaataatcacctagcctagtgttgtcctttgtcacagcaagagcacattaaactttgaagaggaaacatcatagagtttacaatagaactgcaggactcatactaccaaattatctgtatcatgcaaccaacttagcatcattatagtttcatgagataaaataaaaattgctcattcattattaataatctgtttccagcacacagaattaaaaaacaaatacctgagaaaagcagaaatgctgataccctaaacatttatttaagtcaaaaagactcagttgagtttaaaatattgcatttcccgtctcctggtagcacggatcactgaagtgctttgagaaccccttccttcctccatgccacccaaatgctcccagtgcctgttgttgctattaagccagagataaactcaacatcagggttatctatcctgagcactgatggactcggctccaaatacaagcctgtcaagtagcttgtttacagcaagtcttttaaataatgaaactgttccctctaaatacctggccgtcagggtagcatgctcatttcactactctaatactcctgcaagactatgagctccatgggctccacaggaaatgataatgattttgctcatcaatatagtcttagaacccgacacagtgcctggcatatagaagacaatcataactattcatggtgaatggattatatgttaagaatttctccactttatgcatctgcacaatatcctatgaaatggggatattattgttcttttatttctacatttctggggattcaagttgcttcttttgtagtattttaaacactgctgtgatgaatatctttatttttgtgatctctccatatgttagattcccaaaaggagaattaatgggtcaaagaatcagaacatttttatagctcttgacatataatgcaaaatgacttctggaaaggatggaaaacagcatagcaccagcaaaacacagaaaacagttttgaccactttcccaggcataccagctattagctttttaaaagagatgataactaaagggaacaatgaaatattacctaaatatctgttataaatttgtatgactttaatgtggtaaattggacattttctctgtttatttaactagttagattttctgttttgcatatcaaccaaggaatgatttgatgtggcttctgctgtgtgaatgggaaacctttcatagatacttggagaaactttgacactacaacttctctgccaatttgataccttttactttgaatattcctcaagagaatgacaggaactttgaaaactggagtttaggtgatacttccactgttccagggatctctttattctatgtatgaattccaagagaccaggagcctcttagatagattacttacatgtgtgttgataaatatcttcagaggttttcacatgggaagaattagtgagttattttgcagagttgggccagttttacaggccaataaataatgagctaaataaatcacagtcagggaccagcctacacagagaaattgtatacctacaaaagttttagcagtaatgaaattgaaagctgtcaccaaatcctgttatctgtctggatagaaaagtgctcaacaaaaacactgatagcgtaggagatagagaattgaattaaggccaaagaaacctttcagtgaatggcagattgaagacaataactgagtaatagaataaaactttctcaggaacccaagtcttaataaattgctctgtaagtactttgggactacagatctatctaacttctttaagttcccagggctcaaggacgtttggttttgggaggaggcacctttaggatgtacaggaaacctgggcaactcataatagggcccaaggtggaatccagttcgtgtagtccagttaagtttggtattattgtgtaaatacttatacatgatttccagaacaaagcattctctcattgttccagacactcattgcttaaatacttggaatcaaaaaaaaattctaagaatgcttataaaaatattctagaataagtatttaaaaattctcaaggataatccaagatatgtttagtgagcccagtgtttacctcttccttcctttctattttgccaggtgatgcttgatagcaacataaaggttacttatctttaaaaacgctccttttcaagaaggattagtatagagagagctaaatgttaactacaggtaaacaaataactgcattctataaataatttcaaggaaagttttcttttcatgtctccctggagatcgtacttgagtcagggagaaaaagtaaagcagtaaagtcaagaacataggctgaagccagagggcctggtcaaatcccagttctatctttactcgttatataatttgggatgaaccattaaactctatattcctcagtttcctcatctgcagaatggggtttatagtgacaatatctatctcatagtgttgttgtaaaaatgaagtgagttaaatatgtgaaaacactttacaatagtgccaggcacatggcaaagtgtattttccattctgatattatgaacatcttaagagtagtttataaaactgtactgcccagtacccaacatcattccagcacatagtaggtgattagtgaacaattgctgaatgaatggttgactataaaggattttccaccaatattttttttaaaggaccacatttctttgtatcttcaaagcatgacttaattcaatacaggactgacaggtaactttcagaaacaattccagggttcagagtatgcacacctgtacgtatcagcagaatgaataatgagagagcaatgaacaatattagataaaagctaggagaactatagaagacaagtaagagtcttaacccaaatccaaaagactttgaattaatgcaagtattatttccttggcaaagccctggcctgcccttctaatcttcactgataaggccatgactattacaccatctgggataggtcaagattaagtgaagattctgatctcatcactaactactcttatattcaagtgggggttggagagtgggtgggaatgtttcagggagagatcttctaatgacagattcactcatgtaatgctcaggaggtgatttaggcctacttaatctccaggacatctgaaacaacacaatttctggaacaacttcttatcctggaaaatcccagacgagtttaattatttttttaatccctgtgtttagtagtcatatcactcaccactgaaatgcagttcttgttgctggagtaaaagagagcaatgtttttaataggtaccaaagataataggatgactaggcacacagctcacgtcactgaaaacggagacagactggctctaccaggttggaacgaagccagtctctccagggctcactgtactctaggtatggcatcatcagctcccctaccggacagtgatgaggtgagagagtaggcaagagaaagagggagagagtgagtgattaaatgaacaaatacagcaaagttagagaaggtgctggcctacaaaggttttagttaaaaaaagcagggaattttgcattaatgaaatccactgaataatcggtttaatttgagatatccacatgtggctagtggctggcatattggacagggaaggctgggtgagttcacttgatatctctgttctttttctatctccttcatggtgttctcttctctcacctgccacttccatgtcggggttcctttttggttccctgcttttgtgactctgctcactttccatggctgaccttgagtcacctcacattctacgcgatcaaaactgaatttttcgtcttcctttataaaatagttactcttcatgaatttgttagttcagtttgaggcattatcattcacccagaccctcaagcagggaactatccttgacagctcatgcccctccatcccatacatgcaattaattttcaattcttgctatatttaccatccccccactccccaaatctatccatgtagcccaactacaagtatcttctccaaactgtcatcctctcttgcctgcattccacctaacattcttctagtgcaaggattctcagttctggctgcctgttagaatcaggtaacggggagtttaaaatatggccagaacctggatccacctccagagatgcggttttattcgggatggaatagagaccaggcatcaccattttttaaagctctccagatgactttttcagagtcagactgggactcacacatctagctcatcttcctggctctagtttttttgcacctatggccacaccataaagaagcaccacagggctctttacagaacattcacttgtccactctgcctaaaccctttcaatgacggaccacaatctagaaaatgaaatccaaattctttgacattccctggcctttctagtcatgtactgacattctcggcctcacagctagttccccacctgcaggtgccttttcctacctgtgcttgtgacctcttctttgctcagatccccactcttcacctggggaacctctactcatcctgagagactcggcttcggcgtcgcccttctaggaaatctgttctcacttgcttatgagaacagattctctgtacattgaacatcctgtgcataattatatgtatgatacatcacgtgtatgttaacatgggtgcctacacctggatgccccgttgcctatgagcccgttttctcagagcatgtatggtttatacctgctgtctcctttaattattaatggtgctcccttgagtctcaagggtatctgtgctaccatagatgataaattgcagattaccctccttgtaagattgttgaggtcagtaacattgtcgtatttttcattgggatctcagtgcctaacacttcttctaaaacttggtgttaatttatgtgctcaaaaaaattaatgaaggtgctgggcacggtgactcactcccgtaatcccagcactttgggacgtcgaggcgggcggatcacgagatcagaagatcaagagcatcctggctaacatggtgaaaccccgtctctactagaaatacaaaaaattagccaggcgtggtggcaggcgcctgtaatcccaactactcaggaggctgaggcaggagaatcgcttgaacccgagaggcagaggttgcagtgagccgagatcgtgccattgcactccagcctgggtgacagtgcgagactctgtctcaaaaaaaaaaaaagaaggaaagaatgaagtatttacctgggaaactatccttttacctccagaagcacatggtaactgttagaaaggctggcgtaaaaaactgaacaaagaaacaaatggacacatagccacttgtaaaaaaacgtgattttagagagtaaactaaagccttctttctcagctgaatattactttttgtacttttgtgtttttcccgaggccctactgatgttggggaagttccacatagtcatcaggtaggtatagatgattcctaaagcagccccagccagcgtcagttctcagaagggcagctctgctttttatggccaaggatttagaatctgatgtcagacttcttgcatgtgaattttgctcctccactgggaggacatttgacttcagttaagttatttaaactctccaagcctgctttataaataaggatgttaaaagtgcctaccacatacagttcttttgagaattaaataaggaaatctatgcagagagtttagcatggtgcctgtcatagagaaagctctgaatagagtagcccttattattttatctattttacttgttgaacttacaaatatttcatttgaagaagggatttgcctgcatttaaaaatactttgaaaaatcactgttccagaatattgggattgtagagattccaacccagttcccccttgggatttttgtaacttgagttgctaatggagccagtgttatttctttcctctgcaattcagcaacctaagtccataccttgcctgttcactagtacccattagtggaaaagaaaataccaacccaggactcatatttcagtgtgagccacaggtgttgttgggtgccagcttctggcagcatggcatacaaacaaatgaatgctcttgccaatgttgggaatattactgcagtatgcctattacaaatatttacttttttagctggaatatcaggggacactagggtttctgtttgaacagtgctttgaggcagaactcattgaaacaacatggaaagctttgcataaataaattcttttatgattatacttgtaacacatcgtatcatcagactgcaaaataaaacttgagaggataaataatcccagttatttgcacataatgctagttactaatacagagctgtagataacttcgcataaagtataataagagatatttcatttttggtaaaaggctcctatcaactagcattgaaaaagcaatataatttgtgagttacaggctgggggttatagacaatgcctttggagtcaaagacacataggtttgagaaaataatgcacttaagagtgtctggcacctaaaacaaatgcaacaaattgtaactcagagtaagaatattaataataactagtattaatatattattctctagggatatttgatatagttctaccaaacagaaatgattagattatattttgttctatcctatgttattttttactgctgcttttgtctgtaattttaaatcaaccccaaaatattcacataaacttaaaacctgacttcaataatttcaattttctctgagaagttggtggatcaacacagaagtgtggaaatgaaattgaggtgtctgcattttcatgaccagcaggcatgataacttgtcctaaaactgtttgatcttgttacaatttctgctgaatactttgagtcatgcaagaatatagaatgccttttattcaaaagcttccaaaagagagatagcatccacagaaattcagagtgagctgctgaaaggcaatattaatcctgatctcgggatattacgctaaatatttgacaggaatccaaattttcctgtagccttccactaagaagataatctttcataattttaactgtgaaaggggaggatttgatcctttgaaatggaaagggtgagcctaattgaatttccttctttggtttcttattaaagatgggaccagattgaatcatattcaattaatgattgtacttggatatattgctcttttcagaagctgaaataagattaacaaagcttgaaaaagatgtcgggggcaacagtgccaattcaacacttaaagggctaggcatacaaaagagcaaagccctatttcaatgccgtttatttacatgatccttgagcaggctgggccattgttcttgaccaattcaaggactgagtagaaggttgtgtgaccttgaacatcagctatggaggcaaagtaaacatacaaatgtacatatgaatatacatacatggaaataataattaagacataccattctgacctgccctctcttctgactacacaccaaatacaccatgatccttgtcaatgatgagtcagtatacccctataatgtctcatctaggcctacccaaccacttttctgtctgccttcattgctcaggttaaagaatgtcttcttctctaaggttttatgcaagtctagtaaccatggaaccatgttttatggactaataattgtgatacaaaatataacaagtaaattagcacaattactctgaagattttaatactgggactgtccaggagcacaatgcctacataattagtctccataaaattctcccttttgtaagcgttcctcgggtatgttgtttctatgttaaacattaggatttaccacaatagacctcacattatttgctaactgtctcatgtttctgtttgtatgatatactgcttcactggtgactgtgtaaattgactagccctttatttcttcagtgtctgcatagcacaaaacacatagtaggagcttgattggtacttctccaaatgcagttggtgtgtgtgtttgggaggtgatacaagtttggaagataaatctgaaattagtatcctagctctgacccttgacatctgtgggagcctgagtacgtttccacatttgtagtataggcataaaaatacaaatagtacatgcactgtgatgatattgtaggacatttgtgcagggactggtatgcagtaggagctccatccacagtcattctgttgttgaatgaaaacactggcttaagaatgattttagaaggccaggcccagtggctcacacctgtaatcccagcactttgggaggccgaggagggtggatcacagggtcaggagatcgagaccatcctggctaacacggtgaaactccatctttactaaaaatacaaaaaattagccaggcgtgatggcgggcacctgaactcccagctactctggaggctgaggcaggggaatggtgtgaacccaggaggcggagcttgcagtgagcagagatggcgccactgcactccagcctgggcgacagagtgagactctgtctcaaaaaaaaaaaaaaaaaaaaaaaaaaggaaagattttagaatatgagaggcaatggagtatggtgctcattggcttggggatcctccatcagactgcctacatttaaaccccaattctaagccttccagttgcaagggttaaatgactgaatacatataaatcccctttgagcgcctgacacagacaaagatttagcttcagtattattaaggatgaaactacttgagacacacaaatgaacttggtcaattttcaaggtcttttaaaactcttaatctatattcctgtgaagaaataatacatgttcttgcctttaaagctccacatattagaaaacacaggattattctgagacagctctcacaccctacagacacacacactcacacacacacacacacacacacacacagagcagcagcagcattgtctaggtctaattttttccttcctctgtcaccctcatatgtgtgctaattgtagtaactgtgagtccaatcaatatatgttctgtcataaggagagaagaagctggactaggaagatggagttgacgctatacctgacattcagtttgaaacactgaatattagaatgttagtcttttccagagggtctgaataaatgacttgtctaaaatagattcctgaggaaaagatctagactcagaatcatgcattgaaccagaattatcaaagaaaagcctaattctaataaaattaaggctcttccagcagatggactaggtcagcaaaaggtgctctatttaactaactggaagtctttgcagcgttaggatacaaaacatttaccaagaaagtctaggtacaaattgcccatgtaatcacacatctgtgaatttgcagagttttcaaaatcatttagagattccaaggaaggggtagtgtgaactcagcaacaaaatgaaaaataaactaagataataaacttactttgtgatctactcagtatttaaattctttgaaatagacctcctctagcaaccaccattccacattgctttcattcttctggcctggttgcctcctcttccctttcctttaaatgaggtcttcataggatatctcagtttctttaggcatttcctaagcgaactctcagggaattaataccatatctaagacttttatttaaatatagactcttctctgtatcagtttcgctctttcagtctctgtcataaaaactctaccaggtatcattcttttttttcattcccaaatacaatataattgcatttcaagttacagaaactgaaaaggctgctttctgaatggaacaaaatgtcacaacaaaaaagacccactggagaaacacggacagagtgcaatgtcataggaaaatccagaatgtggagaacagcaagttgccagagggttccctgcagctacccccggaacttaaaggatgttctgaaagggcatcacacgtgagctctgttcagtggttataagagtcaggtactggaatcaagacaggaaggaagaaagagaggcagggaggaaatatagagtggtagtaattgggctgaattaatgactctagacagagctatgcacataggaggcagtggttctgacaaagacgaccctcctctggagggacttgccccactcctccaccatcaaaaccttccccatctgtgagtcattgctgagacccagccttccctgtagctgttgaagctgcctaacagctcccctctgacatctgatgaacttattgtccgcaccaggggttctcaactagggaagaattttgctgcagtcatcacatccatcataaaaccatccaagcccccaaccccactgcttcccttctagggtgtaggtctcctaatggactgcctcctaattgatggttcccaggctattgccccagggctgagggccagctccctggtgctgtcaccacctttagccattagttccccagcacctagcagagtgtgggctgccaatggtgtttgttgaactatcgaaagggaggacttgtgacctcctgagatgaagaaaaaccatgtttaaaggggctaatatccagccatgacagcaccagtgccagacagcctcatgtcaggctgtgtcaggcagctgctcagatggcaaggcctgctgccctgaaggcttacctgcctgggagaaagaggcagccacagagtgctcctccagaacacccctactcttcaactgcatgtgaatttctgagtactgatttctagtaagataaacagcatttaaggttgcctcttggtgctagtttttaagatgatatgaattgcatagtccacaaaacatatttgccaagatgtagcatttctttttatacttattctgcctgatggcaaaatacaaaaacgaaacctaaaactagtccaggattgagagattcgcttttctcaagcccatttcctcaggggttcaggtttatgggactatggcattgggcactgaaatgttgtctctcgctgtctccttgccctgcctggctggggtcagtgtgaacttcacaagtcctaccagcaatctagggaagagctagtcctgcctggttccactttctgttggttttagatgcctttgctccggatagttctcttcttatcaggacattagtgaaacaaaacaactgtgctcctccagtaatggccactggctggtctgaaggaccccaaaacctcccacttggatgatctggtcatggcaatgcactgaggttcagctgcattttctacctcagccctggtaggaaacttcctgtttcactgagatgctcctccatgggaagggccctcctttcttgcacactccctctccttcggctaacttttggaccctgcttctggaaatttcctgagacctttgagctgcccgcagccgtctccagcatggatcaccactcttctccctgagcccaagcttgaagcatgcagacttccatcaactgcagctccagctcacccctgagtctcctccttccacttcaaacctgctctttcttcttcctaccctagagctgttttctctactggaagaggggaggaaaggatgagtagagggacctcttgagtctgtttgcgttctcctggtgatcttttcttttaccttcacaagtgacttttgaacctagaagtcaagattatggcaggcttctttactggtatgttttagataatttcatatactcctgcccagggcaactggctgctcctaattgcataaaacagtgttaatcaatgtataataaaaacaagtgtatgcttttgtgacaatccaattcatgttaagtgcacaaatattgttttttaaaaagtccttttatttttttttcagtttgctgtattgtctaaaatgttctcattctcttgactgacctaggtgaagcttttaaatgaagctggaaggtgtctggggctccagtggtatgtcccattcttcaggtgagaaaagagaaagcccaaaagaaggaaggactgatgtcctcaagttttggtaccatggtctagggaaagactcacagcgtcttagggctatctcagcgctgtttaagcacaatggaacagctaacatagggggcccagaaactttgccaaatggcaaatagcttttaaagacaaaaacaaagatagatagatagatagatagatagatagatagatagatagatagatagatagatatagatatagatgtagatatttaaaaagatgtatacatcttctggtattgctttaaaattgctcttaatctttgagagggaagttgagacttggcttgtccctctctctgtttgcagtcaaacaagaggttagtgaaccctgccctccttatcccagcacggtgttaaaaggatcaagtgagataacaaatgtgagacacccatctaaaatcaggaaactcttagaggtctctgtgtgagtgttatctgcagggatttgccagagttctgtgttcttcttccttgcactctgatctttgcttttctactttatgaactcagcagaacaggagtcagccctctccatgaacttgatggccagctcctctgaactccaggcctgaccctctgactagcgctggccttgctgctcctttgaatccatcgcaacatttcctccacagctgacttcctggatcttcactcattgtgattctcctgtggactgtcgcctccatgtgaagaattattttaactaattacttgcattttaagatctgaagaggccagaatagataccatgtgataataaaaaataagcttttaggtaattttgttaatttcacctgaggacactaaacattttcttgtgattgagtgatttacttgggaaaggaaataatttattaaaaggtcattctctttatactaaaaaggggcaagttgcaaaaatatcaggcaatttaactttctcatgttttactgtcatgaaacagttctcaaatctaggtacatctgaattaatacaagaaatgagcttttttttttgtaggttgaatcttatagatttattcacaaataatgattcaataccaattttaaaaagaaaccctgatgctaggtattgtggagtttataaagatgttaaaaataaaatccaaagcaactactttttgggcaaaattggtttttaaaaaattagtttcaaaagacttcccatatatatttgacttaattctcataaaaatcttgtgacacagttattattgctatcactgttttatatttaagaaatccaaggctcacttttgtagaccttggatcaaaaatcccagaacccctgacttcaaactctaaatccttccctttacagagcatgtagacgtttggtttgcaggaaataagtatctctaagaggctccaatgcaaattgttatttggtccttctagggaggagctacttttcattggagtgattggagagggtataattaaattgcgattccacctggtcccagagaaagggagagactttttggcagcacagggagagtaaggaagggggagttcaggttgagggaggggataggtgaacagaggcacagaggggaagggaagctaagaatttttagggaatagcaattggagcagcttgcgataatgtgacacccctgaagaaagcaacaacagcaacaaaaaattagcaataattcaagagatgggttgtataagaccttattgctggaccaagggatttagacatcctccagtgctgagtggaacccactgtgtgtgtgtttgtggcagcgtggtggtggtttcaaatgaagatagaacgattaagcttgtgttccagggcacttggccatgtcttaatgcaagacagacttgcaaagagaggaggtgagaaccaaacaactgcaggagaaaactaggaagctgtcagagtggtccaaggaagaattaatatagcaaccataggaaaggggaagaaaggcaaagatatgagaaacgcaataattagaaaactgaaaagccttgacaatttctagaaggttgaaggtgagaaaagaatggaagtcctacatttcaagcttcagcaagtagaagatttgttcatgttataaatagatatgatattaaagaagaaaagctttctggagcccagaagtgtctaaagataaaggaaaataaaaacaaaaatagctaacacatacttgcatgcttactgcataccaggtgttgctaagcccttttcgtgtaataactcatttaattcttaccccaacttttggagctaggtaatatggcacctactttaaagatggaaacactgaagcaaggaaaatttaaacaagttgtccaaggtcacacagctggtaagtgagggagggagagggagaccaggccgcctggtcccagaagtcgtgtgtatgagcaccatgctctgctgccgctctatcatgagcctcgtcctgagcatgctgcttgattttgccctggaatgaccagatgaagatgcataatgagaaagccaaactcaagatgaaagcttagaagagtaaccaaagctaagcttgcatgtctggagatgacagctgaataatggaggagatgagacaaccatgggagagaggggagaggcaggaagaagaggtgagaagtgaggggaaagggagaaaggatgagaaagaagacagagcacagcttgaagtgcccatatttagtgggtgggaaagaggaggaatcagagaagggaaccaaaagcatgcagtaaacccaggaagacctctgggcaagtttcaagtgcaaccccagtagtctgaaatgaggaagatcgctcaggcaaggagctaaccaagaaagaaccattggtaaagctgaactagtgactctatgcgtggtggaaaacatgccaggaaatgtgcgtaaaaggtatggcttcatgggaggaacacaccacgactttgaactccatctctacccgccatcaattcactgcccttcccgcaaccaagcagtcagtagcaggaaaaacaaattgccatagaccctagaggggctcaatattgatgggaaacattcatgtgcatatcttactgagctacatgcagaattcagaggtaaatgtcaaggtccttgcactcgtgcttttagtaaaatagtcttacgtaaataataaacctgaattgaatcggctcaataactttatttttaaggcctctttctccgtctttttccttccttccttccctttctttttatttccttttttcttctctctctctccttcctttccccttcctttccctgcctttccccttctcttcccttcctttccccttcctttcccttcctttcccttcctttcccccttccctccccttcctttccccctcccttctcttcctttccccttccgttcccttcctttccccttctgttcccttcctttccccttccccttcccccttctcttctcttctcttttcttttctttttgtagagatggggtctccttatgttgcccaggtctcaaactcttgggctcaagtgatcctccaaccttggcctcccaaaatgctgggattacaggtgtaagccactgtgcccagcctctttctttttctaaaagaagggaatttgagacagtgaatcatcttgcatctctacctgtggccttcatcagggttctctaaagattagccagtctatgtccagctggctgagacagggtgccacatgtggtacttccaataattctgtccacatgcatgggccatttcacctctacagctctaagctcactgctgagagtacccatcagactaaagcaaacatgcctattaaacatgtcataaataggctagcaagaagcgccacacacagcagcagaacaaagcagaagtgggctgatcatgtcctaagtccatccacttaaaatttatacttctactttattcctctgaaaatattttgattatgttaccatctgaaatgaaagcaagtataaatcttctgttggatttattctcccctttgtcaaccttctggccaataataggtttgatattgttctgggaaaaaaaaaaaaagagggaggcgggttggtggccacaatttaaaagcttccggaaactcttttccacaaatcaaacctttgaatcattctgtagcatgaggaagctcatgtatttcattgacatgagaggaagagcgagcccgtatttaactaatctatcctgtatagtcacattaagtaataccattgtttaccctgagcagtcaagaggaaagacttactaaatctaaaacaaaagtagcgcatgtatgttcttggtttggttttcttcaagatttccccaaatgctgcaaattgaacttggccttaggagtgcatggttgagcagtatttttttcttaaagcatttttctgctttaaagaaagtctactgacaaaagaggaatcagagtttcttctttattttttttaaaacagggtctcactgttgcccaggccaagtgcagtggcatgatcacagcttactacagccttgaccccccaggctcaggagatcctcctacctcagcttcctgagtagctgggactacaggtgcatgccatcacacttggctaatttttgtatttattctatggacgaggtctcaccatgttgcccaggctggtctcaaactcctgggctccagcgagccacccaccttatatgcttcttaatctctgtagccatctttctcctttctataaaataacatagatagacaagatgctgtgtttacacagacatatgcaccatgtacacatgaataatgagagaggatgttcttattaaccttttttccacatagatttaattatccttgcacttccaagctttttgtatattcccccataatggcacttatcatattgtataaaataatttctcccctacccaactgggagtacaaaatcaagggtagttttagattcactttacattcctgttgcctattgtagagtagttgctcaataagtctttattggctcaaggaatgaataaatgaaagaatgtttccctaaactgctattcattctcatgttatgtatattagaaactgaatttttgcccctagttcttagtcctttttccttcacttttagcaaaacgatttagagctcttgtaccttgggcaaaagcaactgaatggaatatattttatagtcagaatatttcaaggaattttttaacagagtaatagaaaataatcaaaacaggtgaatggcatattatagacaacagggaacacacgttctccctaaaatgggaatactaaaatcagatatctctgaaattcgaaatagttggacttttgggtccttttccaccttgagaattctttgaacaaggaaatatagaggtttaccctaaggcgtgacggttccttttaatgatatgactcttcaactttcaaattctctatcttcaaaatctacaggccaatctgaaatggattctatgtcaaggttgcgatcatagattgtatcatcttgactttaccaccttttctctcttatgtgctgtatcgatttgaactataaaggaaggttaaaatatataattaacattattatgcctcatccaaatctcacagtttccagctttttttttttcaacagagattttaaaacttggatgcataagaactcggttgcatagcacaatttttgtgggttgaagtgccttgacaactacctgccaaatgtctgtgcatctctatgtttgagcatctcaactcccacgggactcaccatctcccaggcagtccatgatcagttgcacaaggccttgttgcaaggcagcaaagatgtacctaccagaaacatttattgatttgcccatatttgtctacttgaggcaatacaggccaagttgaattcctcttctcaacacacacgcacacacacgcgcgtgcgtgcgtgcacacacacaacaatttaaaggtttaaaagaaagcttatttgctcagtctgtgctgcccatctgttctccaggctaatcttccctgttctgttatccatccctcaggtaatgtcaacttgagtcattttattctcccagcaattcttctctgggtatattccaatatgtccatcaagtgcattttcatatgtggtaacctttcctgaacacagttgttttcagcatatgttgaccagtccaatgcagaggaagaggatgacctccatcattccattaatgcggcctatggtaacattacgtttttaaaagccattcatattgagattactattgactattcggatgcatactgttaataagcttatagccctctgatgagttgactgtacagttgattttgaaataatgacagaatttacatttatttcttttaaatcatttaaaaatatatatccaacaactttcattgggtgaaacattttcaatttaaccacacactattctcaaatgggatatacatggttctattctctttattcatactatcaaccaaaaacttgaatagctccaaggccacaaaagaggcacgtactatgccacaaaaaccttctggttgacatcaatcttcctttggggacaataattcaaccaagatctaattcaccacatggtattagtatccagactacagttctccaccttttccaccagggtaaaatgagaaaccttataaaaggttttcatatgctaaagccctaaaagaatattttaccaaaaatcaaggcagagaaaaatatattatttcattcattgctcaagctgtatttgggttagagcccccaaacccccaaaatgtatgccaacctggaagctgtgaatgtgactttatttggaaatagggtctttgtagctgtaatcaagttaggatgaagtcatcctggattagagttggttctaatccaataattgttttgtacatagacacagactcaaagagaagatggcccagtaacatgaaatattgcaatttttagagcctaatcagatacttaagagggacccagaagccattctttactctgatcttacagtcatggatctgaacttctaaatgcaaagcaagttctctgggaaccctctctcaacctcacctttctctgcatttcaccactgcaaataattgatggccaaagtttcagtcaggtgggtcaggaccagttcatgttcacatatcagaaagcatatgccccagtggcacatgagtatccttttcagtaatcaacttcatcagcgaaagtcaagtcattttctgctgaaaagtgagttgtgaaatcttgtctgtcttctaacagatcttttccctggaatgccacacacggccatgcaacaatcactcttatacacagaacttttttatcttttccaccaaggtaacatatcaacttcactaagaacagatgactttcatgtgatttttgagctaaacctccccttcccattgcagggcagagagcatgaccatattagtgtctatcaacaaagtgacttgcattctgggtcctaactgatgccagcaaccccacaatctcagaaagcctggcatgaaagtgaattatgactttgtctctttctgggctaagccatctatatggcttgcaaatgtatacttgatgaatgctactatggaggatgtctcttcaacccgaaggagtgatgggaacttcaaacatttccctgcttaaaaaataattgtgtgttgtcttccctcaagcacaattacacacacacatactgagtaatgggggctatatgtgcactgcacaagaaaatttagaggaggagaaacttcatagggaagaaaggattccatttagcagtcttaaggacaggtgatctagcaaatgagtcccctgaaacagcttaccagctcactccactataataatatttcaattatctgagacctgttagaaaacaatcaactggccaaaaataataatgcttggccccaaataccatgtcaaatgcagcctcctctccttgagagaaatgtttcccatgtctgcaattgcagaacacactgaagggcatccctgctccaaagacaagggagaatttgaaggaccaaagcattaaatgcagccaactaggagaggctccttgcttgggaaagcaagcagcagttgtgcaggcagtgcatatgaatgggattatgggatcaggggaagccctgattaaatggaatatgtgcccaagaaggaaatccactgatggaggataatccacatgctataaatttagacctatggctgataatatgtaatggagaaattgtccccaaatctcactataaaatttcatttgtaactatgcttctaagtggcatagatgtaggaaggaggcagtaggggagaggcaggtgatacattccttgcctgtacacaatctcctcaaacaacacctgtttaaccatttctaaaatgtaagatgttgacatgacagaaaggctctcagaagcagcagtgtgaaatcaatccttaaatccattcagaacaagattgacgcatcaggagttagactgtgaaacacacagaaaaggcaatcaaagcaggacttgtttttacatgccctcccgtgatgtcccagacccaagccttgccttgggaagccatgtgtggcctctttcccctgtacagtcatgccctggtgttagaagttactacttttcaccacacccaaatttagtataattcatttatttatattattagatagtgagcaacttgagggatcctctttccttctttttctctctcctgctattaccattgctacctaaataaattcactgttgaataagtgaatgtatatacaaagtagtaggactctcagttctccaaataaggcaaccagtaatcaatttaaaaatcttcaattttacagaaaacaatagaacttgaagtgttttattgtctttatctcatcatcctaagggaagagtcattagttaaaattaaacaatgtctgataattttgcccagtcatcaggtcacctcaatcaggaagtatgtaactagaaaatcctgaaagcaaaggttatcaaaataaattcgtcatttgtccatttcaagatacttatagaaccactgaataaagaaccctagaatcctccatctccttaatgcaaccaatagttttagacagaactgcaataattccaattgactaaaatctcacccacttaaaataatctgataaaaatattgtgcacagcattgaccaaataacttcaattctaataacaattcctaacacattagtaatagaggtggacaaacccttgtgaacaaagatgttcactgcatttctatttataatggcaaaaaaaaggaaagagaaagaaacacagttggaatttgacaaaataagggttattcattcagtggaacatgatgtagccagtaaaatatatttatgcaaattgtgtaattccattggaaaacactaataaggtagtattcataaaacaggaaaatgaaaggttatatatccaacgtgctctctaatgaatggaaggaagaaacaaaagaaggaaggaaggacaaaatatcaagtaagttttatttctttcaacttttctggatatgtttataatgaacaagtactattatagtaatcagaaacattaatgatagatttgcaaaaaattaagttgaaaacaagaaagaattacaggagaaagagtccagttttgagcccccccaccaccgctgaatcactatcatgtttgtcacttgcatggtacaattcatcatgtatatctaatttactttaataattatctgaaaaacagtaatggttttctgttaggttgcttttatgtcagtttgcaaatcagtaaaagggacagtatatgttcatttttagtacggctaaaaacaaacaaactggttgcctataataagaaatgaagaaattaagcttataagctttaaaatgttcttctaagtagcttttaaacatagaacttggcttttagagggcagcatatgtacaatggataatataatttaaatataaatggctattcagaatgtgattaccatctataaagcactggtgacttactttgaagtaagtatttggtatagaattatacttcaacatactgaggatattgataaatattgtgtttgttatctgaattaggtcatcagggacaagattcagaaaatggagaaacacattagaaagctttaacagtgctctaagtgcctttgagatgggcatctcattaatattcatatcaaatcatgtaatatttattaaacattcatttgtgtcaacatttggtattgacatcatagatcaaacaacagacttgtaaactcaaggtcttctctgcccaagaaagaagtattctcagcatttcctatttcagcttctgtagtctttggagtgcttttgacatggctgagattttaaaaataatcatacctatcatacaaatgaagcacagttaaatataaacattactttcttagatggttcaacatttcaaggctatctggataaacaggttgtacgggcctacatactttcagggattttgtttttctttcgaactcaaaaaaattaggtcaaactatcttacctacaattatgaagctatctgcagaacccaagatattctttagggtcattaagcaacaataaatgaatataattggaatgttacctatcacaggtacaaaacatctggggagccagttatatactttcatccaaagggtctgatttgagaaaatacattggcatgatatactcaactttaatatttaaaaatgtttaaataatattaaaaaatatttcgtgttgacttgtatctgagtctttgttaaaatgctagatgaaacacgattttctaccttttgtagccacaacatgtccatccagcctgatttgtttaaagcaataccaacaagaacaggatattatttacagagatagtcaaagatgaaaggctccacaatttttcttggcatgattataatatctcaaagccttgacatctattttttgtaaagcctaaaatgatacatctcgatgaagtttatgcccatttcatccctttcaaagtttaaggtcagctatttggtatgcctttatgaataataaaattatggctttcctcccttctaggccttattgtagccaagtggctttagtcattttcatgggacagattttccaatgtctttattattactctaccttcgccatctcatatttttaccactgggccctagatatatatatcatccattgttcagcatgctctacccagtggaataatcatatttagaatggtctataagatgatcattctccattgggtccaatttacaatctgtttctcccttttttctttcgtatgtttttctgctcattcaaattatgatcagaagctaaggcattttcatatccaaatgctctccccatcacttctaataccatcaccatatattaaaaatagaagacaatatgaaaggaaagcaataaaagaccctcgctgaaaaagtccttgcactttgaaaaacaaacttatttttttatacaagaaaacagaacttaaaccccctttttatgtttgaaatcctgacaatcaaatagctgtgacattaagacttcacaagcattaagtcttatatcagccgtggttagatgtaaataaatccaccataaaagtcagtctaggcaaaaacgcactgtaacttaattttctaaaccacaggagctgggaagcagctgaacttcactaaatcagacagtaccaaaatggataaacatccgggctctgtatcttttgtgatggtgtgccatatcttgttagattctctgcacatttgttgttttatgagcaatgatattatcactttatgatctcaaggaataacccacaacaagcataaattaaggatgggacctgtagcagacattgggagttccttgctaaattttcattgttgcttttattcttcactaacaaaacccccatattgcagcggtagcaatctacccaactgcaagagaacatgtcccaggcccccatgcagaaaggagtagcaattatgatgtaagtaggaggcactgattgccatcgtgtgggctttcaggaaaattctctaaaggtgcctgatttggcaggtgcccttttgcccttccctctccgccttcttgctagctgcactctgcatcagtcatattgtgacctgaagtgaccttgagagcagaagccatgtgataagaatggcgggacagaagagaaaaggagtgcaggctcctgatgacatcaaggagtcatccatatcacctgtaattcgccttcctctgcagttcatgttccatgggagaaagataaatccttttttgtatgtcatgatattttagatgtcttacttgcaggtgtacacaactcctagttgatgaaataaccttattatgtagtgaatttgaaggaggctgctgaccccaaatcagtaatacattagtctgaaattatttttccattagtaacaattagttggataaagcaaacacaatttctttttaattggcctttcttgtttaacagaagtacttatttcccagatacttggccaaaggaaagtaaactttaccagtctaagtagtgtcaaacccacacatttaaccacctttctctcagcaactacatagctgcttatgaacattatcaggactgtcggacacgtcataggtgtaacaagatctttgtatttccatttctgcactgtccaaccaatgtcttccgttaacacagctatgagcttcatctctaatgtgcagcattcgtagcaaaggggccccaggtaagagtaggtccttaagtcaggacaaggatgcattgtatttcatacaaaaaggggacttgagaggtacatgatgaagacagagattccatctgacaaactgattcccatgtggccggcctggagacaggggaaattggattaaatagtttctgatggctttatccaggctaagatttcaatgatctttataaacctccattaatcatgtaatcatctttccattttggaactgaatttagagcattttaagataatggcttccagtgtctgtagagccaaagctaaaatatgacctcaaagagtcaccccttcccttggtgagatatcaaatcctaccactgagaactctttctcatttgatgtgaagagaaagatgcccacagaaacacacctacaccatttctaagacagaatggcaatgcagccttaatctgcatatttcaaaataggatgcttttaaaagattttacagctggtttaaggatgagtgtaaaatatttaagatgggaagagaaattataaggtaattatttttagacagtctgaaggaacaaaatcttatggaaatggtttcattcagaacaatcagtaatacagatcaaaattaacactcatgggttgccaagtaaggagaggtgcaaggcaactcaaatagcattcgtttgtgtaatttgaaaaaaggaaatctattcttaaagggccagtttttctccctctcccattttttagaattagtgagtaaatctcaattcttttttctagttttttcatgctacacataataattggttatgcaactaaaatggtacaccttacaatttctaacaattctgttaaggacaaaagttaaacacgattttctcctcttgtctctgtttaaattagtgtgtaagtgtgtacgccctttcccaccactttatgtgattcagccttgatgataggtctctgttacattgcagccagtaaatctgttatgagcttggctgccatgtgcaaccatgcctggaggctatgttaaaaattctgagatccatgaacatcagcaaagtttttgttcagtttaagctgaacaaacagagttaaagacaaactttattgagtttggagtgggtccatccattgtcactggactaggtactgacaggctaccagctagagtaacgtttactggattagcgaaaatctactagctgttggaggagagaataaggtgctaatattaatcatgaagagcatgggaaaatgaaactctttcaacaatgaaagcaatgctcctttctaccatgaaagttttcatccctcttcctcatctcaatttcaaaacgccatatcctaagcatcaagtgcaatttaaaaacatgagcaacattatgtgttgggcatctagatggttcatgtgtgcagagccggtgaaaacttgaagggccttgcaacatcctggctgctgtccaaccaaaacgatgaaatatggagtgagacattatttcctatccccacaatgcacacctaccttgcaagtccacaatgtgacactgagtcttttggattctgagtgtcacctttgataaatctaccacaagggaaaagtaagcccccaagaaaggaaaggaaattttgttattgttgttatatacacctccagaaaagttatggatacattttcctggatgttaacaggactgcaagaggaggatctgggtggcaggagggggatgaagaggaggctgataaggactctcggggtttaggaacacaggcacaagccacagtctgtttaaattgttaagttatcaatgttgtcaaattgagatgtcaaaattatgagctggtctagggggaatttcatctgcatgtagacagatctcattagaaaatccttaaaatggttttctacaactgaagcaaatcttgcctaagaaagagttgaatcactacctgccttgtgaaatctaaatatgcatctagtccatctttggctagtgatggaccttcctcggctttacctgaactctctgcagttctgtgttcttttctctctgatgctaagttcatggcaagtagaactaacacaaagccttggtcaatagttgtagcatttggcatctggctaaggaaggattttcttagcattttccttcacaaagccagattccatgtatgttttgtacaattctctcaaattgatagagacggggtctcactttgttgctcaggctggtctggaacgcctggcctcaggtgatcctcctgccttccaaaatgccaagattacaggtgtgaaccaccacatttcgcccaaattgagaggtgagcttcagcaaagcccaagacttcatgggctaacaatttctctttggcttatatgagtgtaaggttcttatagggttcctctggggcctatcagaggaggctcatttagtccaggccttcctttcacccatagtcccaaaggtagacgttcggtgttatctccaagtgaaatcatacctatgtataaagaaatatactataatagttgaaagaataccacatgaaggatttaactttagttattaaatgaaaatgcctaaaatgtgtctggacacattttaatatactgggatcctcaaaaactgcaatggcctggattctgttgacctgataaaggcctattgaggtatactaatcattacagacagctttctatgtgaatcatgaagatgtatttaactcatgatcacacaatgcatgggtaattacaaacacgtaatgagtctgtaacttcctgttcaggcgtgggaagcacacactttcattaggaagcacttttacatgaactattactcaaatgtgtgtaggtccatgtggaatgaaatgttcctactttaaatatcaagttcagtgttatgtctgtttgatatttaaaacattgataagtacattttcaaagacttacgtgcaaaaagaggaaagataaaactcgcatcagttcatttttcctttactagtaattagcagatagaaaaaaggtgctatttgtgactaatgcttagttttatgattttaaattacactctgtctccattggatgcataaataagagccctctaactacattttcctcttgctacccttccaacactaacaaggaaattagctcacacatattcaccaccctatatggttatatactttaacattcagcaaaaaattctaaattgctcacttactgagctgaatcacatagagggctgaaattcatccattaatgaattattgtattgcctgaggtctgcttagagctacctgattttagaattaatggcagaataaatcttaagaagaaggccaatatattttaattttatgcatattacctatttgagcaatatattctaacatgagtttggctgtaaatatcttattactactaagtatcaaaaggagttcagaaatattcactaatatacttcatattgcaactttaaataaaattaaaatttaatctacacttctgagaatagaataattgtcgctcatttactagaataacgcttaggagcagatgcatataatgctcataaaaccatgaaagaatagccattgaacatttaactagaattgtcaggtacaaactataaactgtaacttaaaataattttattttcttcctctaactgcagaaatagcacctaaatcaattagagagagctaagaaatttaatcttgaggaaaaaataagatttttattaaggagagaaaaatcctatattttatttttgtatttagactatttcctttacaaaacagctaaatacaacattatgataaaaatttcataggtaagccaaaatagagaatttataacatttaagctaaatcaaagcattatttatagttttcagagaaaaacaggctatcttttgatataatacaaagaaaaatctattaaaatgatttttctaaatttggtttggaagagaatgggcttaagtaacttttctgttggttgctaggaaatctaaatgatgttcttcctgaacaagcaacacaaagcgctacgttttactgcagccaaagggagatgggatggggcaggtgaatagagaggggcgggaaatgacagcaggtctcaggcaatcttcatgctgtgcccattgggaggaaggacctccaaatagaaacattatttatctttgagaggtgaagtcatggataactttttccattcattttctgttgtattttatgagttatataagttaaatgaagatttttttctagaagttctatttgattctttttcaaatctccttgatcaaaacttcttaatagtttactgggttttgcttccattttcaagtttctttattatttttctaacagctacgcattagggtaaagctagagcttcaataatgagaagcagagattgaatgacctaaggtttatatctctctcacctggtctcagtgtgaatgggctagatcaatgggacagatctcctttctgcgcccactcagagttccaagtcccaaccaagcaattgctccaccatcccctaggacatggtcaacatgtgtgtggttaaagctaggttgatgccctcctgggctccagccgagtgtgaagagacaagagggtgcattgacacatcacttctacttccattctatgtgtgagatcctgatgacacagcctcacctgattgcaaagagaactgagaaatgtggccaagctaggcagtcatccatcctacatactactactaccgtggagtaggttaaaatggactttatgagtagctacccatcacaacatgaaacgtgaagatttcataggatatgcctaatatttccaatatcaaagtctctgcaggtctgactctgctatttcttctgcttttcacttactgtgtcatgtttccctttatgtttgaggatttttgaccatgagttcatgtttatgttctatgggaatatatggttatgttctatgggaaaataattttgcaggaatgttttgaagtctgggttaaagttgcattatttcacatagggaatgtatttgcttttgcctaacaaccctaaataattttaaaaatgtatttgcttaagttctgcttgggccttataggcaagtttccttgttggtatcttccaggcagtacagtcaattccagctctcatcattctgagattgcatcccttttgggtctcaccttcattgggctctgatctttacctgccggtcacatcacatgataaagttgtcagagtggagccataatggatgggcagatgtcttggtgcccactttctttctaaattcctgttgttactaaatcttggcttctacagattccttgtttttgtgccggcttcgcaaggcatttgaaattatgggtttttaaaactgtgtatgtttgttttatatttttaaccagcattttagttttcttattggaaagaatggaatctctggtccaagatagcatcagaaatggaagttccaaatatacttttataagacaatcatgaccatgattttagagagatcatcacaagtagatgagaactagcaacgcaagcctagagttttactactgagtcttgtgtgttatatcatacacagaacttggatttcttgatctgtaaaatggggagaataataaccatattacccatgtcagtaagttatgatgatgacagaataaggaactttgcaaattcttaaacagtattgccagttggaattgagactgagaacctcacaagccacaagcataagagcatgaatatgtcaataggcaacagacatgttaaaatgcaatgatttacaaagtcgttttctgatatcttccaccggccctactcctgctgagccagccctctcattattggtttcacctgtgaaacagttctctgccactgctgacttcaccgaatatcttctttgtacttccatctgcgttttatgtgaactctggagcgattagtcgctaatatcaacattggtgcacagtctaggaacatttattgctcccctgcttggcttaatgtttctgacttggtaccataatattattaatagtcacagggtacaataaaagaaaattaagtgtttattttgtttaggctttagccactttacctacagcctttttccattacatttgcacataaatgagcatacgccacattttttagatacaaatcaggttttaactttgctaatcatatagtttcctttctggtagtcttccaggctggtttcagtgtgactccagatgcatgcatattgtagcaaatgaagaaatggccatgtggtagatgtttgcccttttgtgattcacaaatagtgtttttgaagaaaaactatatttgtaaatccactctgaacattccttttcaattccaggagcacatctttaagttttaggctgaagtccattgttcaattccagattattttctagcaaatagttgggaacaactgccatggaatatgtaatcattgaaggcatgagaactacttgaaataaaagttactagaaccaagttttagcattaaagggcccccatttctcagcatgagaagcccaaagccctgagatacttaagtgggcatccaaggccaatgcagtgagtttattccatgtttcctactttctctaccacctcctaggcaatgttcttccaaatgaagtgtttgctttgccttgaaaagacaaattaatattttacatggcaacaactctttattccttggtgggatatttccaacttgatttatatgatggtgtctaaatgcttaaaagcttttgtaaggcagggtttcaatcgattaaagaatttagttttccttgaggttcttgcatcagatattatctcagaaggcctacttcctaagatttataatccaatctcttcctcatgttaaccatacattttggtgagcatcccattggaccaagcttggggatttcagttcagcatcatcatgtggagtgactgcaaacagcacgggggagcctgcatgccccaactttccatcaacgggctctggctgtacaagacttcagtttgcttgctcactagcaatatatatgagtcctctgggcttctgggaatatctcacaggttcaaaaaacagatgattttgaacagaaagacagaaacacagtattctaagataatctgtacacatgagtccttctttattaaatcaagaacttttaccttttcacttaaaggaagtaccttatggcttctctttgacatatatgaattgccagctccttgaggatagaaatggcacctatcatagtacctaggtacaaaaatgttcagcaaacatttgctaaatgaataaataaaataaatgggctgggagtggtggctcacacctgtaatcccagccctttgggggccaaggcaggtggatcatgaggtcaggagattgagaccatcccggctaacacggtgaaacccagtctctactaaaaatacaaaaaaattagccgggtgtggtggccggtgcctgtagtcccagctactcaggaggctgagacaggagaatggtgtgaacctgggaggcagagctttcagtgagccgagatcccaccactgcactccagcctgggtgagagagtgagactccatcttaaataaataaacaaatgaataaataaatgtggaaataagttaatgaggagtagcctgagatgtgggaagaaggcagtgaggagtagaaaacttggatgccaccttgtcattgccttcagctttgtctggactgagacttcaacttaagaagagaacttgcaagtcagacactcctcatcacttgccaacgtggcatggggctctcggtgaagcttgatgtttccatctgtaacttggggccaattatagactaattgagaagatcacatgatttaagatatgtaaatacacagaatagtatctggcactgcttttgctttttttttttattattatactttaagttttagggtacatgtgcacattgtgcaggttagttacatatgtatacatgtgccatgctggtgtgctgtacccactaactcgtcatctagcattaggtgtatctcccagtgctatccctcccccctccccccaccccacaacagtccccagagtgtgatattccccttcctgtgtccatgtgatctcattgttcaattcccacctatgagtgagaatatgcggtgtttggttttctgttcttgagatagtttactgagaatgatgatttcccattttatccatgtccctacaaaggacatgaactcatcattttttatggctgcatagtattccatggtgtatatgtgccacattttcttaatccagtctatcattgttggacatttgggttggttccaagtctttgctatcgtgaataatgccgcaataaacacacgtgtgcatgtgtctttatagcagcatgatttatagtcctttgggtatatacccagtaatgggatggctgggtcaaatggtatttccagttctagatccctgaggaattgccatactgacttccacaatggttgaactagtttacagtcccaccaacagtgtaaaagtgttcctatttttccacatcctctccagcacctgttgtttcctgactttttaatgattgccattctaactggtgtgagatggtacctcattgtggttttgatttgcatttctctgatggccagtgatgatgagcattttttcatgtgtcttttggctgcataaatgtcttcttttgagaagtgtctgttcatgtccttcgcccactttttgatggggttgtttgtttttttcttgtaaatttgtttgagttcattgtagattctggatattagccctttgtcagatgagtaggttgcgaaaattttctcccatgttgtaggttgcctgttcactctgatggtagtttcttttgctgtgcagaagttctttagtttaatgagatcccatttgtcaattttgtcttttgttgccattgcttttggtgttttagacatgaagtccttgcccatgcctatgtcctgaatggtaatgcctaggttttcttctagggtttttatggttttaggtctaacgtttaagtctttaatccatcttgaattgatttttgtataaggtgtaaggaagggatccagtttcagatttctacatatggctagccagttttcccagcaccatttattaaatagggaatcctttccccattgcttgtttttctcaggtttgtcaaagatcagatagttgtagatatgcggcattatttctgagggctctgttctgttccattgatctatatccctgttttggtaccagtaccatgctgttttggttactgtagccttgtagtatagtttgaagtcaggtagtgtgatgcctccagctttgttcttttggcttaggattgacttggcgatgcgggctcttttttggttccatatgaactttaaagtagttttttccaattctgtgaagaaaggcattggtagcttgatggggatggcattgaatctaaaaattaccttgggcagtatggccattttcacgatattgattcttcctacccatgagcatggaatgttcttccgtttgtttgtatcctcttttatttccttgagcagtggtttgtaattctcctggaagaagtccttcacatcccttgtaagttggattcctaggtattttattctctttgaagcaattgtgaatgggagttcactcatgatttggctctctgtttgtctgttgttggtgtataagaatgcttgtgatttttgtacattgattttgtatgctgagactttgctgaagttgcttatcagcttaaggagattttgggctgagataatgggttttctagatatacaatcatgtcatctgcaaacagggacaatttgacttcctcttttcctaattgaataccctttatttccttctcctgcctgattgccctggccagaacttccaacattatgttgaataggagtggtgagagagggcatccctgtcttgtgccagttttcaaagggaatgcttccagtttttgcccattcagtatgatactggctgtgggtttgtcatagatagctcttattattttgaaatacgtcccatcaatacctaatttattgagagtttttagcatgaagggttgttgaattttgtcaaaggctttttctgcatctattgagataatcatgtggtttttgtctttggctctgtttatatgctggattacatttattgatttgcatatattgaaccagacttgcatcccagggatgaagcccacttgatcatggtggataagctttttgatgtgcagctggattcattttgccagtattttattgaggatttttgcatcaatgttcatcagggatattggtctaaaattctctttttttgttgtgtctctgcctggctttggtatcagaatgatgctggcctcataaaatgagttagggaggattccctctttttctattgattggaatagtttcagaaggaatggtaccagttcctccttgtacctctggtagaattcagctatggatccatctggtcctggactctttttggttggtaagctattgattattgccacaatttcagctcctgttattggtctattcagagattcaacttcttcctggtttagtcttgggagagtgtatgtgtccaggaatgtatccatttcttctagattttctagtttatttgcgtagaggtgtttgtagtattctctgatggtggtttgtatttctgtgggattggtggtgatatcccctttatcattttttattgtgtctatttgattcttctctcttttcttctttattagtcttgctagcggtctatcaattttgttgatcctttcaaaaaaccagctcctggattcattaattttttgaagggttttttgtgtctctatttccttcagttctgctctgattttagttatttcttgtcttctgatagcttttgaatgtgtttgctcttgcttttctagttcttttaattgtgatgttagggtgtcaattttggatctttcctgctttctcttgtgggcatttagtgctgtaaatttccctctacatactgctttgaatgcatcccagagattctggtatattgtgtctttgttctagttggtttcaaagaacatttttatttctgccttcatttcgttatgtacccagtagtcattcaggagcaggttgttcagtttctatgtagttgagcggttttgagtgagattcttaatcctgagttctagtttgattgcactgtggtctgagagacagtttgttataatttctgttcttttacatttgctgaggagagctttacttccaagtatgtggtcaattttggaataggtgtggtgtggtgctgaaaaaaatgtatattctgttgatttggggtggagagttctgtagatgtctattaggtccgcttggtgcggagctgagttcaattcctgggtatccttgttgactttctgtctcgttgatctgtctaatgctgacagtggggtgttaaagtctccattattaatgtgtgggaatctaagtctctttgtaggtcactcaggagttgctttatgaatcttggtgctcctgtattgggtgcatatatatttaggatagtcagctgttcttgttgaattgatccctttaccattatgtaatggccatctttgtctcttttgatctttgttggtttaaagtctgttttatcagagagtaggtttgcaacccctgcctttttttgttttccatttgcttggtagatcttcctccatccttagattttgagcctatgtgtgtctctgaacgtaagatgggtttcctgaatacagcacactgatgggtcttgactcttgatccaatttgccagtctgtgtcttttaattggagcatttagtccatttacatttaaagttaatattgttatgtgtgaatttgatcctgtcattatgatgttagctggtgattttgctcattagttgatgcagtttcttcctagtctcgatggtctttacgttttggcatgattttgcagtggctggtaccggcttttcctttccatatttagcgcttccttcaggagctcttttagggcaggcctggtggtgacaaaatctctcagcatttgcttgtctgtaaagtattttatttctcctttgcttatgaagcttagtttggctggatatgaaattctgggttgaaaattcttttctttaagaatgttgaatattggcccccactctcttctggcttgtagggtttctgccgagagatccgctgttagtcttatgggcttccctttgagggtaacccgacctttctctctggctgcccttaacattttttccttcatttcaactttggtgaatctgaaaattatgtgtcttggagttgctcttctcgaggagtatctttgtggcactctctgtatttcctgaatctgaatgttggcctaccttgctagattggggaagttctcctggataatatcctgcagcgtgttttccaacttgcttccattctccccatcactttcaggtacacccatcagatgtagatttggtcttttcacatagtcccatatttcttggaggctttgctcatttctttttattcttttttctctaaacttcccttctcgcttcatttcattcatttcatcttccattgctgataccctttcttccagttgatcgcatcggctcctgaggcttctacattcttcatgtagttctcgagccttggttttcagctccatcagctcctttaagcacttctctgtattggttattctagtcatacattcttctaaatttttttcaaagttttcaacttctttgcctttggtttgaatgtcctcctgtagctcagagtaatttgatcgtctgaagccttcttctctcagctcaacaaagtcattctccatccagctttgttccattgctggtgaggaactgcgttcctttggaggaggagaggtgctctgctttttagagtttccagtttttctgttctgctttttccccatctttgtggttttatctacttttggtctttgatgatggtgatgtacagatgggttttcgatgtggatgtcctttctgtttgttagttttccttctaacagacaggaccctcagctgcaggtctgttggaataccctgccgtgtgaggtgtcagtgtgcccctgctggggggtgcctcccagttaggctgctcgggggtcaggggtcagggacccacttgaggaggcagtctgccggttcccagatctccagctgcgtgctgggagaaccactgctctcttcaaagctgtcagacagggacatttaagtctgcagaggttgctgctgtctttttgtttgtctgtgccctgcccccagaggtggagcctacagaggcaggcaggcctccttgagctgtggtgggctccacccagttcgagcttcctggctgctttgtttacctaatcaaggctgggcaatggcgggtgcccctcccccagcctcgctgccgccttgcagtttgatctcagactgctgtgctagtaatcagcgagactccatgggcgtaggaccctccaagccaggtgcaggatataatctcgtggtgcgccgttttttaagcctgtcggaaaagtacagtattcaggtgggagtgacccgattttccaggtgctgtccgtcacccctttctttgactaggaaagggaactccctgaccccttgcgcttcccaagtgaggcaatgcctcaccctgctttggcttgcgcatggtgcgcgcacccactgacctgcgcccactgtctggcactccctagtgagatgaacccagtacgtcagatggaaatgcagaaatcacccgtcttctgcatcgctcacgctgggagctgtagactggagctgttcctattcggccatcttggctcctccccccctgcttttgcttttatgtactgatcatcatcatcatcatcaatcatcagtcattccacaagaaactcgggattacactttttgatcctaaaaacagttcagctcaattgtcagctctttaatttttttttcaaaggttagagtcctctcaggtggcatgcaccatccttgggtgcacacccctcttttgtgggtgtgcttacctgtcatcttggcctcagcacgaacagccactttactcctgctaagtgagcggctcatatgcacttttttagactgtattggattttataaaaccttaaaattggtaatttaagtgccactagcaacttgtctttaacaggtggagagagatctggagcccatcctaggaaaaagcaaatgacatttctctcttgcgacccagtcattgcaaatttggtctgtctttgcaaggaacctagtgctagagccattgctaggttttcatatcagggggaataaaaacctgggaggggaggggggaagcaagcaggcagagggtctcaagctgtgggttggttggggtatatatacttagaaagacactgccttgggtgatctcctgataattgctttccaggaccactgatgctttggatacacagttaacatggcttcctcccaggctttatcatcataggctaaactcctcttgcatgaatctcttacctaaggtaatgttgatcagccactactcctctccccttgtcctgaccaaatgccctctactgtctctcacctcatcagggctaccactgcaatgcccaggagatgatgcaagccatccctacctcacttgaaaaattatcttactcaagtctcaaactttcacgaccatatgttatgctttagtttgacatggtcattgatcataaacttttatttatttttctttttatctcaacttagtgtcctggatgtagaaatttaattgagtaaacttctagaagcaattgttatagactaacataaaagaaaaacctgagggtaaatataaaatcatccacaatcccaccatcttaactctaatacctttaccattttaatgcagcaaatcaccccttttatatgtaattttatgtagctgtaaccagattctccttgagcctttgcctgccctaaaattctgcttgtttccatgatattataaacattattttccatatgtgagaaaaacatgttttctcacagttgtaatacaaggtttataactatcattttaatgtctgcatactgtaactttcctttagatttcttataaattatcttgtatctagtagcataagatatcaagagcatcttatgcttctagacattactgtggctttagatgcttttcatttaattatatgatgaagatcttggtgcaatggagttttggcactttgattattttgtaaggttttattattgcttctcctctcctttttaggctcccctccaccacctatcctttaaaggttggggttctcttgggtttcatgcacaagcctccttccacacgtctcttcggcccttagtaagctcatctactatcaagcaaggccttacctccccaaacattctgcagggtccgagacccatatgtactaaccctgcaaaaatgtaccatgtaatcacattaactcctcaaatattttcccaaacactaaacaataacttctcctagaagctgctctaccttctgagcagatattctcagataatggcacccctatccaccagatctgcttggttagcaacacctctaggaatcttctctctctcttctccgtatccaataggcatcaagtcctctgcagtgctgccttagaaatctctttacatgttggattgcttctcttattggcttccacatggccactgccttgatccaggcctttatcatcttgataaagatgataattgttacctggtttccatgctaaaaatttcttaccactgcaaccagtttgatcttaaacaaagctccctgattaaaaatttagttagggccgggcgcgatggctcacacctgtaatccaagcactttgggaggccaaggcgggtggatcatgaggtcaggagatcgagaccatcctggccaagatggtgaaaccccatctctactaaaaatacaaaaattagccaggcctagtggcctgtgcctgtagtcccagctactcaggaggctgaggtaggagaatcgcttgaacccgggagtcagaggttgcagtgagccgagatcgagccactgcactccagcctgggcgacagagcgagactccgtctcaaaaaaaaaaaaattaattaatttagctttttattggctacagaagtagttgtcaaagtttagcatgcctcagaataacctagaggacttgtgaaatcagagcttgctgggtattatcccccagagtttctgattcagtaggtttcatggggttgtgaggagatggacagcagagaatctgcaattctaatgagtttccaggggatactgatactgctattctgggagccatactttgaaaaccactgttctataagataatagttaagtttctaatcatatacattttgaaatcagggctcagtttatccttccagccttactttgtaaacgttgtctagtgaaaattacttttcagctattctaaaattaccaactatatgtggtttctatctgctttcaaaattacccctcgttgtatatgctgtaacttctgactgaatagcctcatatttaagtttttctttgtcaattggcaaacagtgccaattggcaagccagttactacagagctacaaattcaaacatgtatctagagcagttcaagagcaaaaatgcataaagcaggaggaaggaagaataaagagagttccatttaaagtactgtatgatccagcaaacccacaaatgggtacatatccaaaggaaatgaaattagtatgaaagaaagtgaatcagaggtatctgtgctcccatgtttattgcagcactactcccaacagacaagatagggaatcaacctaagtgtctgtcaacagatgaatggataaagaaaatgtgatatctatctatctatctatctatctatctatctatctatctatacacacacacacacacacacacgtacatacatatacacacacacaatggaatactattcagccataaaaagaaggaaatactgtcatttctacaacatagatggacctggagaacattatactaagtgaaataagccaggcatagaaagacaaataccacatgatttcacttatatgtgaaatcttaaagagttgacctcacagaagcagagagtagaatgatggttatgaggggctggtgaagctgcaaggcaaggattgaggagatattagtcgaaggacatagaatttcacttagactgcaggaataagttcaagagatctattgtgcaacatggtgaatagagttaatagtaatgtatttcatatttgaaaattgataagggaatagattttaagtgttctcatattaaaatatgggaggcaatgcatatgttaattagtttgatctagccattctacaatgttacatatataaaaacatggttatgtacaccattaaaatgtacaatttttgtagatacaaaaaataaacaaataatgaataataaataaaagggcagcctctatctctctcctactaattatcctctgagaatattgctaagtctttggaatttttcaatagaagccagaattctagggttttttttttgttgttgttgttgtttttgagacacagtcttgctctgttgcccaggctagagtgcagtggcacaatctcggctcactgcaacctctgcctcctggggtcaagtgattctcctacttcagcctcctgagtagctggaattacaggtgcgtgccaccaagcccagctaatttttgtatttttggtagagctgtggtttcaccatgcggaccaggctggtctcaaactcctgacctcgtgatccgcccgcctcagcctcccaaagtgctgggattacaggtgtgagccaccatgcccagcctagaattccagatttctaagcaaagtctccacattcttagatagtggtaatggatttcaacaaatgtaaaaccatatgctggctgaattaaacatatctgcaggctgaattcagcccaaggcccataagtttgcaactatagtgctactccttattcaagaccaagtccaataactgttcctccacacagcattcccgatgtctgccaggactcccaatgtgcacacacacatgcacaagcttagtcacactgtcctttctgttcttaaggtactgtgttaaaatttatataaaagcatgtgcttcaattaaaccatctacataaatgacatccccaacccacaactaaaggctcaagagcagaaacttagattaacttctttttttcttattttctaatgtagtatgcctatcaaatatctgttgaaggatggaagaaagatcgaataaacaaataaaggtaaactctattagaaaatagcaggcgatatcttattccatacatcttaacttccctttgtatggatttcctcagtgacatgttagatttttcacaatgaaacagtcaaattttagccatgctttccacagatgtacagaaaaatgttagtccaagctaatataaacactggaaggatttagatcaagcagcattattttaacctgtctttcaagagaaaaatgatggaatgattcatgacagtgactaaaggcatcaatattctcttatcataactccaggtaagctttcacatacatgcaattaatcacagcattataaatgggaaaaggtatgtgtcaacccaagaatcagctgtctcctacctatttaatccaaagaaacccaacaaaaacaaaaagcagaacagcaagaacaaaaaatcagttctgtactgtgccagacaaagaagaagtcaaaccagaagattcttccttatcctccatccatgtctcttttttattcctgaagttgtccagcctcacagttctgcatgtgatttgaaagcagttaaatagaaagttaaaagttttcgaattaattttaacagaggttttgttgagccctgaagggtctttcctaagaagaaaatgttattgtcaatggtgcccttcaatttatactttctgtcttaataaaactggttgcagagtgtgcaatgcaaagtcaggttgcctttcatcttttactaagcattaaagcattgaggaaaggaaaaaacactttaagataattgcaattttcttcaattatataatataacttcataacctgtaagggttttcattaaccaaggttcatcaattctaatcgggctgccctcgcattggagaggcccataccagtgtaattaaagctgccgattctgctgacagcattcttcagtttccagggcccttatcattgatggataagtcatcgagcagcatgtgatggccctacatattgccttcctgccttcacttttcaggagagaagctaatctccatgcttttaatttactcttcatacattcttcccctagagccaatgatattaatcagtgttttaaaagaaagaaattaggcaaaattatgttttaaaatgtttaaatagagccatctgtcttcggttctccttccccctttctcgtggaataggcttcatgctcttatagcacattgatttttatatcatggattaatattttctttaggaaaatacatctgatttcccggatcctctaacataaagtacctaaatcaataaggtagttacagatgatgctgttataattacctcttttctttcagaacagcttctcatcatgagttagatgtgagattggaatgcatgccatggtcccttatttgaaatgacccaggctaccacaacagaaccaagcctgcagaggtctggctctgaacaaccttttctcacacatccgcttttgttggtcagtctcaatactttctccaaaagcactattttaatcatgatactcccttatggagaaacttaaggttggattaaactatcctagtcagcaattaaacactttctccaaagtcattgtgctacgagactctaattttacttccttagaagagcaaaaaggagtgaggaacattgaccttgagcccaggcgttctggcctagtggtctgccttcatcagagctggttgctcctgctgtaggttcaaggtcaatgaactctgactattgctttcagcttgccattggagagctgtatcctccctttgataaaatcttcttggctgacttattttcagcttgaacattctgctctatctgctccaggaagacagatctgcttttggtgccctgcccatgacttacatatcttccacttagttacaagacagcctccttttcctcaggggatctgttccaagaccttcagtggatgcctgaaacctcaagtagaacccaaccctatatacactatgttttttcctacacatacacacccatgatagagtttaatttataaattagataccacaagagattaacagtaactactaataaaatagaacaattataaccatatactgcaataaaagttatgtgaatgtggtctctctcactctcaaaatatcttactgtactgtactcatcatttttttcttcttgtgatgatgtgataacttaggctactaagtgactcatgggtgtgtggcatattcagtgtggacctgctggatgaagggatgatgcacatcctgggcaggatggtgcaggtcagcatgagattttttcaggctactcagaaaggtgtgcaatttaaaacctatgaattatttatttctggattttccctttactattttcagaccatggttgatagtaattgacactgcagaaagcaaaactgaggataagaggggactgctgtgctgagatttatatgacattcatccagcagtattttttataaacactcttattattccattgcacctggatccacatcaagcctttaaaaaacagaggaaaactaaggactccctcatgaagaactaaatcttcaaaatctggtttcaaactcactttctcttttagatattgttctctatcacagtgaatctcacctggttccaatcatgccagcaagtccactgccctttactgacagcagcagtgacttttgcaatattactgatatttctaatacctattcctgacacatttctttgcacttttcctagcaaccccatttgataatgaacttcttaagggcaatgatctttgttttctttgaaacttcttccaacaggtgcaagaggaaccctggatttggagtcagtaactccaacatttactagcactgggatcttgaaccttcctagaaatctctggaagactcagtttattatcattacatggggacaatcatgtctcctgccctgacacctcgataggcagggctgtgggtaaagatcgaatcaattatagtccaccagggcactttgtaaacagccaaggctcatgcagatgctataacacttatgctgaataaattttgctaacagaaaaactagccaagatttatgacgaaacatacaggatagtgatttcactacccttaccctagtcaactgcgatgcatttcaaatgtttcatctcttttctatcaccttgaaaaagccagagtcttaaacccaaatatgtaaggatcagggagtcactagaaatgtgtaaagaatacctcgcacaagataagacactaaagcatgctggggacagtgacaaaatgaaaagtccatgtcttgtctaaagcagaaagctggcactagatccgcccaattgtcaccctgaagaaaggtgagccaactatttcaagggaaactgcaatccatatttttataagtgaaatacctagatgtttaaattgttggcctttaatttggttattaaaataaatgtgtagtgttcaaatatatcattaatggatatgccccatgtgtcacaagggtttgcaactttggctcaagatttttaacatctgagtttgtatgaacaatcagcaagtgttcttcagctccagtaaaaactaactctggaccaagtttttgggggctgttaaaaagaagtataaggcatcatgcctgcatcgaaggagaggaattaataattattatgtgcctaacatttattcagttactttacatacttaatcagtttactttaacataatccttatgaatttataaggtgattactgttacaatcactttgctaacgaagtaaccaaggttgcttgcccaggagcatgtgacataactggtaagtagtggagcaataatgttaactcagttctggttattgtcaaaactgatgtttctccaccatggaagggaacatttcaaagtagccagaaaagagaacttgaaatatttctaatgcacagaaatgataaatgctccaggtgatggatgccctaatataccctgacttgcatatacattctatgcatgtaacaaaatatcacatgtacttcataaatatgtacaaacagtatgtatcaacaaaaatagaacaaaactatcacagatccatttagtggagaccaaatttagtgaaaatcagttgtctttctgctttattgcagtacaagggaataaataaaagatgatgaacccagaacagaatcaaaagaatcaaagacccacagaataatcgaaatttatgctggatggtggtgacactttgataagacattagaaaaagatataaactggtgaggaatatgtcactctgagaaacttagtggaggatatgggcattgggttagggttatttaggatttgttttctttttcctttttttttttttttttgagacagagtcccactctgtcacccaggctggaatacagtggcatgatctctgctcactgctacctccacctcctgggtttaagcaattctcctgcctcagcctcctgagtagctgggattacaggcatgtaccaccatgcccggctaatttttgtatttttagtagagatggggtttcgccgtgttggccatactggtgttgaactcctgacctctagtggtccacccacctcggcctcccaaagtgctgggattacacgtgtgagccaccacacctggcctagggaattagaatttggataaatagaggatggtagggggaacagcataaatgagagactgagtggatatgagtaccttaccaggtagtaatatagttctgctttctcctcccctttcccttctaacaaacacactccagcttctgtgaaggagtatctgttggttttgcttggctccatgttctcccagcttttggtaacagcacccttcctgtttttcctttggggaactgtcctgccatcattctgtcctggggtttctctgatcctgtgcatagagcctcctgtacgaggtcacactcacatattcagaatctggaagtgagaaagtgtttactctacagaagcaacacaggcctaatggtgtctcttcaatcccttgggtagacaattctactcttcagaaggtaccagacagattgaccctcagttgcccacagccatggctgattcaacaatgcacctttgcatgggcttctcctccttctctaattcactcttgctcatctcctactcctactccgtggattcacttcccaaatgaactgcgtgttccaagcttttgaattatgccctgcctgggaaaaactctggttaaggcagttgttcgtgacaagattcccaaactgtcctgccatccagcattcccaaagccggattgctcaagtcaaagcaagatagctttgactctgctattgacctatcctctactattctaaaaatttcaccacttcacttttatcagctggtgtccatttctgtttcttgccaccaaaaaacccgaactgatttatgactctatttcaaatagacctatatcataccattggataatagaagaaaagttctgtacacatactaataaaaaaatctcactaaatgtcagtgtggctattgctttggatggcaagaaattctgaaacatctgacagtattattaaacggctcttgaaaaacaaacattatggatgggctgcacagtcatctggcagtgattcacggtgtttctgccaatgcccacacctggcatgatgaagtgttggaacccagcatttccttcataaccacctgggccttgaaggctaagattatatatgatttttaaatttgtgcaaatctataggatgtgtgataagatttttacatgtatttaatgtggagagatcaagtcagggcatttagggtgtccatctcccaagcacaacacattttttaagacttttaagttcagtatacaggtttgttgcacacataaacttgtgtcatgggggtttgttgtacagactattttgtcacccaggtattaagcctagtacccattagttattttttcctgatcctctccctcctcccatcctccaccctccgataggccccagtgtgtgttgttcccctctttgcgtccatgtgttctcatcatttagctcccacttataagtgagaacatgcggtatctggttttctgttcctgtgttagtttgctaaggataatggtctccagctccatccatgtgcctgcaaaggacatgatctcattcttttttatgcctccatagtatttcatggtgtgtatgtaccacattttctttatccagtctatcaatgatggtcatttaggttgattccgtgtctttgcttataatacatattttaaagtatagtaacactactctgctatcaaacattgaattataccttcaatcttactatatatttgtacactttaacccacttctcttcacccaccctctcctctaactcatgctagccagtctctgatctatctttccactctttacctccttatgttcacgttttttaatcttccacaaacatgctatatttctttatgtatgtgcatggcttatttcactcaagataataactttcagttctcatccatgttgctgcaaatgacatgattttattatttctaatgggtgaatagtattacattgtgtatatatataaaattttcctttttttttctttttctttttctttttttttgagtcatgcactgacactcaggctggagtgcaatggtgtgatctcggctcactgcaacctccacctcttgggatcaagcaattctcctgcctcagcttcccgagtaactgggactacaggcatgtgccacctcacccagctaattttttatattttagtagagatgtggtttcaccatgttgcccaaagtggtctcaaactccttagctcaggcaagctgcctgccttggcctcccagtgtcctaggattacaggtatgagccattcatctggccccaaattttctttattcattaattcactgatggatacttaagtggattccatatttttgctattttgactaattctgcaatgaacatgtgagtgcaattatttctctaatatattgatttctttccctttgggtagatatacagttgtgagattgctggatcaaatcataattctagttctagatttttgagaaatctccatactgtttttcatggtggctttactagtttgtgttcccaccaacagtgtaatagagttcccttttctctgaatccttaccaacatctgttatttttttttctttttaataacttctctattactctaacccaccaactcattgaaatcgttgtctttttttgtctctcatgtaaggaccactcctgtgatacagttttctcttttccaggtgagaaactatagaaccgatgcaaaaattaaacttatatctcatttttccatgacattgtttgcccactaaatcatacagctttccattgccactttaattaaatgggttagattcatactgagttcaagtatttttaacattcctttatctatctatctatctagctattgtccttcttcttatctatcatctgtttttctatcatttatcattctatctactaagtagctccaaatacacaagtatatccctgaaaagtggccatttttctaaaatctgcatcccaaattgcaaatggaaaaatctacattattatggtgcatctggtccttgttaattcttaatctgttgtatcttttactgtcatgatttcaccagatgtgcaagtctatctcacaagttaatattttacataaactactctaaagaattgttgaaacaaagttgagactccttggctcccaacactctctccatacaggagcagtctaagtctagctgaccaaaagccaagaagatcataaaaatccactgacttagaaacttgcaaatgagtccaagattctccccaccctccttgggtgtgtgtgttttaccctctgttgggtttacaaaagaaaagatgctcaggataatccagaattttattaaagattaatacgtttttgagaactttgctaatactctgcaaaaaaaaaggggggggggctttttctctcttaaaatagaattcagaacaacgggctttcttttaaacaatgggttcaaaaatagaacttgccatttggaaaccttcttgagattttctagaacagtggcttcccaaagtagctgatcattagaatcgctcaggggacttttaataaaaatgaagattgcatggtctccccccatatctattgaagcagaatttctggcaagttggaccaaatttcctgggtgatcctgatattcagccaggtttgaaaaccatggctagaatgtggagttggaacattaaatactatctaagcagttaacattttagtgcctgtggttataattttattctattaatttcctttggatttatgttttggaagtgaagcctggatggggaatcatttggctattattttgtccaaatccctcattttgaaaaagctctttgaaaagcttaaaaaggcccttgcatgatggatttgcccaccagtgtctagatcctttattgctgtagtgactgttgctcttctatcagaactgcacctctaagagcatgaagacaggcctgaggggaagatggaaagttatttctatcttggctgaatcctcaggattgagtcagaaaactggagaggaccagcagaaaccatctggtccagtccttgtcttcatgtggttatgatttgcttctaggaatttcaaagcagagagagtccactgctggtgtttcaagatcccgatagtgagtaagttcttccctagagccacctggtgttgctcacaagccggcatgtcctgattcccaatgcaggggaaacgatgccatttcccatccctttctaatttattccctagaactaagaagctacacatagaacaacatgacaagatggattaatcctaatacaagttaaacatccctaatcccaaaatccaaaatccaaaattaaaaagtttttgagcaccaacatgatgccacaagtggaaaattccacacctgacacctttgcttttctaatagttcaatgtacacaaatgttgcttcatgcacaaaattatttaaaatactatataaaattaccttcaggctgtgtgtataaggtgtatgtgaaatataaatgaagttgggtcccatcccaagatatctcatgatgtatatacaaatattctaaaatcaaaaaaaaattgaaatctgaaagacttctgttttccagcattttggataaaggatactcgaccagtatgaccatggtataatgacaaccctagactaagtcaagaaatctagatggtagtcccagcactgacactaacagaatatgcaaaatcaggctaatcattaatatttttgtggcttagtttcctcatctgcaaacgaaagaagtcaaaccctttctggcttgatgtagtatatgcctatcattccatcattcatttacttggccatcaaggcccttcaatgtgccttaatgaggtcagtgctcagtaaaagtagggaatgagacaaatatgtcccgtgaccacaaagatattatatttataaagaaaatggacaaataagaaacaaacattggtatgtaattacgtttatatcttttctgcaaaagaaaaggaaaatgttgagacagtcaccatttaggctagagtctttcctccccccgacagcacgcctggccctctaattccctaaaatgtggaacaacagatggcccatgcattccaagaattctctaaatggactgatttacccattagcatgaaactgatcaatcttattagattttggcagcttctagatgaccatatttatgaggaagtgtccaagtttgctggcagaactatatatcttccaagaaaactaatagggtctccaaactttagagtctaaagagatatggccctagtgtcagtattatcacttggctaggaactagtgacaaggtcaaaatcagaaactgaagtcatcgatcggcacatcagcttcacatagaaaaagtgtttcatggccacaaaatgaactattaactcagcccttcacccaagtgtgtgttggttacaaaggaacccaatattatatggataactcacttaaatatatcactagtgatggaaaacatcttctgtagcattttatttgctgcatactgggggtggggaggagggtgtcagtccagtattaatcaactctactaacaagctgtttctttacactgaggcaacacttgtaactttccagtatgtctttgggtcagttgcatagatgatacatgcaacaacactatgaggcagatgggatgatgtattgtatcacatgcccatctgaaaggataaactatggcctaagaggattgagtgaatccctctccagtcatgtagttaattggaaaatgtgtgcacgcactgcctcccacccatctccccaagtccctgtctataccaaaggactgcttatgtaaacacggatagtgacaaagtccacaaagaatatattacatggaggagaaaacacggaatagatcacacagaagagaacagagcacagttggtctctgctcactctgtataatccattgcattctttctcagaaagccaagttgccagtgactatactaaatgctgaagtaggtagacatcacatgcctttttccgcttatttgtttttaaagaagaaaggtcttaggttagacacttcagttctttgttcaattgcatttgagatatttcactgttgttgttgtttatcagcaacagtggctgcatcgtcattttcactattcctttgggatgaaatctcaaacccccatgcagtgaggctagttgtgtgacagtgatgacaagcacttgttccatcacctgaagtaccttcttggcaatccctcctatacctacctgtgatttaaagtaggaaagcccttaaacatacagtctgaaacagaattggaaattacagatggtttagcattcaacacatgtgaatcacagaaatcagttcagtcagctgaatttacctcattagattatcagaaattttgactctgtgacagcttgagtggtgaacgtctacaaatattttttttctctcagcaattttgcagaaggccaagattttgatgtaactaaatagtgtcaggcattatgaggagctgtttgtttttgttctcataaaaacaattagtaagctattccctagaatcattgatggacaccagttcattcaacgggtcattgtatttcctgtaattcagtcttcccacactttttcataagagctgtcattggctgggaccttctttgagggaaacaagccctgaaagaaacaatgactccagcttgtatgaatcgcaccctggaaaactcagcccagcacactgcaggagtaaaaggcagtgcccagccctgtgtctttgaaagactggctcaaaaatagcccggacattttcctgtttggagaactcagtaacagctgttcatagcccacatttctttcataccctccccagccacaaagaaaatacaaattcacactagctgtaggaatggacgttattcaacattcgtgtgccttcaaaaatagcacaggaagagttatagacacaatggagggaaaaatgaggaaaactcaggaggagtagagagactagggaggagatgcttttaaacaatgagaaacttaaaataagcaggaaggcaaaaaagaaagggcaggatttgaaaagtctacctctgagaaatgatagggtggtgtgaaaagggcactgtagtgggagctgtaaaagtcaagaatgttgttggctctgctgctaattagttgtgttttctagagcataccccttaccgtctccaggccactaccatagaatggtcagggggtggaggcaatagagattaagcggtctctaaaaattcatcctgattctaaaaatgtcacattgtatgaaagtatagaatgtggttattaggcaggggggagttgggagaaacactggatataccctccatgtatttatgtatcagtcccctggagaagggcattcagtggtctgaagatgaggaaaaaagaaacacacccagcttcatggccacttccttcccctatcctagaatagctgcctgagaggatggtgagaaagtggtcttacccaccccaggctacagcagtagcacccagaaagacgtaaagtccagttctcaaagacccacgaccaccaaatttcccctgtctttcatggagtcccctgtaggttcttgccaaggatcacaaattcaagatggcagagtgcatgggctccaacagaagccatttagcatgtaggtaaaaagtcaggtactgagccagacagaactgcattttcactttaacagaactgcattttcactttattgagggtttgatctgtgacctttggtatataccttaatctctccctgaacttaatttttaaaatatttctcaaatggagacagaaatgcagttatgaattttaaatgtagttgtcaaagtgcatagcacagattaagtgcttaatatacatattatctattattattgttaatgttatattcatggaatgctttacttagcttggagaagtgttttttgtttgattttctcaggtcccttgacctcctgaatcaccatatcatctttgatgaaaagcaaacaaaacaaccaaatcagaagacctctagcaagggctggtcaaagggcttccaacaagtgctggtggctgttgatcagacattgactagagctctatcaagcatggaaaaatcagccttaaatccctaatgtagaccaattagtgagtaaatctcaacattttaaactgggattccaattttatagttagagctccctagggcaacaaacgcacatttttccatccagtctaggcatatggagtgtttcccttacccctcccttcagaaaaaggggcaggctgagtacagtggcactttgggaggcaaggcaggaggactgctcgagcccaggagtttgagaccagcctgggcaacatagggagaccccatctctaccaaattaaatttgggaggctaaggtgggcggatcatgaggtcaagagatcaagacggccaacacggtgaaaccccttctctactaaaaatacaaaaattagccgggcatggtggcacgcacctatagtctcagctacttggaaggctgaggcaggagaatcacttgaatccgggatgtggaggttacagtgagctgagattgtgccactgcactccagtgggtgacaaagcaagactccatctcaaaaaataaaaaataaatttaaaataattgctgggcatagtggtgcatgcctgtggtcccagctacttggggagctaaggcaggaggatcatttgagactaggagtttgaggctgcagtgtgccatgatcgtgccactgcactccagcctgagccacagagggagactcaatctcagaaaaagtcggcaggtagttaagggggacatagtacatctccattttggcaatctcataggaagataagatgttttatttggttcttctgcatttgaactgtgctgagaaattagttaacaaaaagaaactataggcatacatacttatctgaaatgaggaacctaacacacaatgtcagccttttctgcagacacaggggttagataatctgaaagggccccatgggacaaatcatcctgagtgagaggagactctgagggactatttgatattcaggcagacagagattcaaaaatgtgtttcataggggatctttcttagcagaagtcggagaatacacagtcatccattcagaaggattcatgtgagtttctgtatggaagcaaggctttgatagaatggtattttaggggcaatttttacttctaacacacattgatgtagtcttcttacagcaaaatagaatcataggatttttaagtggcactaaacttatacaatcttccattgaaccccttcattttatttgtccaggtaactacttgactgtattttaaagtaaaccctgaatgacctaaatcttcgtgcaataaaatcacaatacaatacatgagagttctgtttgtttgtgtgtttgtatttgtttttgtggagcactcagtcaatctggctaaatgcccaaggccctggacattggaccattccatttgaaatggacacggtgacagaaatgtacctaaggaccttccaaggacaacagaacacacaggaacacaaaggttccaactaagtggtagaaactgtgataaccaactctgtaaatctatggatcagatttcacaccaggaactagctgggctctaaaggggagatttccagggcaccaggcaaaggtggttgtggagagggctgaggggaaataggctcaggatgctgacagaacaggggccacaggatctccaagacagaatcccagttctacaaatggtcagggaacaacccttggcatcttttcattttcaacataatttcctgaatatccaaatgaggagtactcatgacagagccctccctctgcccagcatcaacggctataaccctggaattgggtacagcccaagtgttgagcaaccctcactctcatttcctgagtggagtctggtccccagccaggccaagtgtggtccatggagagtagttacggcgatgctagtttttctagatcctttagggaacacccacctattcccaggtgattccaaagctgatccagaaaagcaacacatacaaatcctaccaaccctgtttttagatttcttacttctactgacggagcagttaagacctgccctgtggtaacaatgttatgtggagaaaagtacaagagtatcaccaaggttatgattaaatcccagagcatctctaaacaaatgaagcttaaggaaagacaagaacagaatagggcaaaggcaaaagatcccacctaaaattcaaaacactatctctatttctgcacggtcagcataatggtgaaaaggtcccaagctgagggatgaggatgtgatcagaagcaaagtcaagtgaggacactgggataggaggcacctcatgggcaatcactgagcacacacccatattttcatagtgctggacagaacgaggcagacccaggctgctaggtccaggaaaacagaactgacacaattgactacaagtttttccaaggaagtgttcatttttagccaagttttctttgtggactccagctctggctgtttgctttgtatttgccaagtttataatgtaagttttatgatttctgttaagaggagtaagtttccctcaaggagagatctaaagtaggtaagcctgcttacttttccaaaagaaccagaggaaacttcagggaaatgctaagctgtggaaacaggagaagaaaagaatttggatgtaagagacagagaagatgagaaattctcaaagtgatctcacattcatctatgagttcatactcctatcattcaatagtcatcaattcattcattcatgtgttcaataaatatttcttgggcttttatggtttgccatgttaggcatcagagaatgggcaatacagctgctcttgagcttgccaccttgtgtaagagatggataatacacacgtaaataaataggaatgtaatgtccgggaatgaccattgttctgaatccaactatcacaggaagtggggttcttgatggcccagcatgagctacttctaataaggtggtcagggaaggctgtctgggagggtggtggagcagagaggttaagacctgcctcatggtaacaatgttgtgtgcagagaggtccaacagcgtcaccaaggttatgattaaatccaagatcacctctaagcaaacgtaggctagggaaagacaggaacagcagagggcaatgggaaaagaccctatctaaaattcaaaacaccatctctattcttctgatattctatatgttaacagatagaatattactcctttcccagaatacatcagaatagatctgttcttctccatccctatgaagtgagggagggagttttgacaagacgtgaaggaatagccagcttttctgctaaggagatgggagcatagttgaagggccataagatgaccaaagtgactaaagccacatgggcagagctgagatggaggcaagagacagtagtcacttcccgcagagaccgttaggtcaggagttcagcatattgtttgccacatataggtctgtaatttgtttatttctgttgacagaagcttgtgaaaatatgtatttctttgcaataaatctgtgtataaatgtccttcacgcatttttactactcatatggtaaacagggctttttccatttcttctctatgttaccttctccaggagctcctgcccctgcaagctcttctgtaaggccttcccagccactccaggccagcatgcttgctcccatctctgatgcatctcccatcctgcccccaatccctgctctacctgtatcctatgccatatctagttagtgtgtgtgtgtgtgtgtgtgtgtgttaaggtctatcttgtcaccaaagaagctcccggtgaaaatacgggctttggagtcaagaaagatttgccccacccactaattcagccccaccattcaccacataagtgaaattagtttctcagcctcaattgtaaaatggggatgacaacattggtaccttacagtatagttgtaaagaagatgtagtatatgaagacagtgtttgggaacaggagtgaggccagcaggtctgtgggttcttgcggaaagcgggactgtgcctgtgattttcagttctatttcatagcaccttataacacaacgcttcctgtgcgtggtctctgaagggagcacaacacactccaaaaatcgctggatctggaacgatcagaaatagattcccttctaggttctgtctctaactagttatatgaccaagaaccaaagtaatttaattattccaagcctcagtttcctcatctataaaataggcatgattatgccaatctcacagggatgttagatatataacctgtgagattgtatatggaaagaagaaagcattttctgttctaaaattctgatcctgtgatttttcaactcttgttgatctaatataaaatccaattacatgaatccacaatttatttaacaaggaattcatagactcagtgcttcagtacctttctctgacaactccttcctggactggaagaccagggagtggtgaaagccatcttgctgttgcccagaacagaagtcacaaggggagggccagtgtttaaggtacatgtgactcaacacatggctatcagaaaacaatgtatttctttccaagatgaaggtcattaacaacctctgcactggcaaacctgacaaattactctgtatttatttcagcctcagatcttctacctgaaacagttcaagtgacattaaaaatatctcactaagtggcagtgtaaaattgggtgtagctagggaaggtcactgtgccctaacagactcgctcagcgactttatgcaattctaaatgtactctggccttgacagaatttacattttgctgttacacttcagtgtgttttagagagagccagatgtataacagttgacaggcatgcatgtcaatacaacaggtccataaagcaggaagaagatgggcatagggaaaaggtagctgataaataacaattaccattagccagtgactaaatactaataccttcatactattctttttcaagactatcacgtaaccctcaccatgactttggcaagcatatgaaaactggtaatagtttgggtcctactaaaatattctgtaactcaatctgtaggtaccacgggagtaaagaattttgtttactgatgtgtctcaaacactgagaacagtgtctggcacatagtatgtacttaacaaatattgaaacaaaacccaaaaaggaatgaataaatgagaatcctgttttgagtttccctgcttaattccaggttcattttatatcacagttgcaaagcagtttgtgtttagtcatcgtcatctacacaattaaacatggttcactagttagtttataaagctaatgtttccatttgcttatagtacacagaagagtgatacattagaatgggcaatgccatctcaagaaagaagagtgagcaggctggttaaatgatgtgacaaagatcaggcagaaaaaatagtgacaaaaggagcacctggaaggcccaaggccagctgctccctggctctccatcacccaagggcacttatcactctgtgggaggaaattaggcaaagggagagaggtcaagactttcttgcttgtccaagaaatcattctgacatcaggaaagtttgggtttgtgagaaaaagttggtagccctttaacttgatctatgtggaactcatgctttggcctttttgttcagagacagtgccgttgcactgatgcagcatctggaattgggagtaagaggcccatatgggacccctttccatttctgttttaccatttgcctctgcaatttgagacagacccttcattgtaccttaagtgttcattctcatatagccaaaaaccatacaggcttaccaacaacactgctatcaaggcctaatttctgtcttatacaaaaccttgggcttagggctttacctttacctttgttcaccaagatatctcagtttttttctctcctaatgaccttctcctctgcatttccatgtcattgcctcagctccaccttttcttgagtcttccctaaacaaacagaagtacttcccagccagtttcaatgtctcaagtcctgcatcccttcaatccattttccatacttctgtctgtacaccaaaaataaatttctaagcctcctaaccaagtgaatgagccccctcttagccaagagcattccaaagtaaacctgaaactcgacttcaggccatgatgagaaggtgcggtcagacatgcctcattataccctcctctctatggaaatcgggtacaactaaccagccttaacattaaagcagggatgttaagactgataaaatagactttttatagcaataagacacccagttccagcctagctctggtatagccatacatgtcagagagcaggcaccaaaagaaattattttaccccaaaatatatttttgacatactttgaaatggccctgcaaagtagaggaaaatctacattttgtcgagaatccccttccctttccaggtcttttccctgatccaagagagaactgactaagagtctggcatcttttaaggtatgataagagctctgaagcctgctacctggaagcttcatctgcacaacaaaaccttggtctccacaaccccttatcttaacccagaaattcctttctattggttccaggtctttagataataactttttcaaccaactgccaatcagaaaatctttgaatccacctatgatctaaaagcctccagtttgagttgtcctgcctttctggactgaaccaacatacatcttacatgtattgattgatgtcttatatctccataaaatgtataaaaccaagctgtagcctgaccatttgggcccatgttctcaggatctcctgggactatgtcacagtccatttctcactcatttttggctcagaataaacctctgtaaatattttacagagtttgacctgttgcctcgagacttccaccctacacgcgattccaaaaggcaatcttgattgcataggaaaaccagttgcttagcacagaaacacactgacgcttagtgcagtaggcacagggactgtgtacagatctacacatgcagaataaactggaaaccagccattacctccctcaaaccattgttagactcatccaagatttgtgaagtccagcgacagagcagctccttcagttactgcaactactgtttcatgacagccagtttttgaaggactgtagtcactcaggcacacaaaaagctccgaactactgaataacaggatgatatagaaggattcagtccagagacatgtctgtggagggggaaggtggaagattaactagtcatacctaggaataaacctgctaactcatctgggtagtgtaaatagtagatctgggtagaattaccagctgaaaattacattttaaatatactaatagtaaaatatttccttgctggttactctcaggcaaaattttatgcctgcctcatatagtgtcaggatgtctcaaaatctaaattaaattaaacaacacacttgctttgacagatcatgtgtttattcagaagtttattcaagccaggagcatgcacaaaatctgacagtattcaaggttataaatttttttaaaccactgtttcagtcaaatgtatctaattaaatgcttttggagatgatgatgttagtaaaccaggtcaactttttgacattatttacagacatgcagacgttacttgcttaacaaatcagcccttgaatcttcttgagtccctgattgattacgaagggattacaaagaaaataaaatcttgcagaaaaagggaaaccctcctcacctaagaaactgttaaccctgtaggtgatacatgggcacctctgggacaaaatcctgagctacttgttcatttcttactgaaaattacctttctgaaagttccatttctcattatcctttatggtcagttccagtccaacatctttttcaaagtctgctgagtccttcagctcatgttcatctcccttcccttggccatttataggacgaattttttattcctcttgattttgcatgtaacttatatattatcaagacagaaaatgcatctcataaaacttaggactgtaccaaccacatagcaactactacaaaaatgcttttggagctttgtggcaacttcacattgactagaactgtgattcttaaggtgtgagctctagcccaccagcatgggtatcagcaacttgttagaaatgcgaattcatggcctcactcagatctgctgaatcagaaactctggggttagagccagtaatctgtgttttaatgagtctttcaggtgattctgatgtatttatatgctcaagctggagaactactgtactgggaaaattggcatctattcggaaaaacttgaccacctatgagagccactgaggctcttataatagattcagagttgttttattaaaaaaaacttcccaagtatatttgcaaagaagtgtttcttgcaaaaagtaggcaccataagattagacatctgaggaaaacaataacaacaaaacaggaaaatgtttctctaacaaagcaacacagatgatatttccagttatcaggagaattacttagcacttactgtcagcacaaccacagcctcctgaattaattcatattctgggctgaatgaacgtgcaaagcttattcccatggaaactgagcactatacagattgatagggttatagagcatataactgagctaaagcaattgccaattttaaaagattagcattgacaatttaatgcaacacatttatttcccaaatatcaggagtgtctcatctacattcaaggataaaggactgtcaaaatttgatttaagaaaaaataaaaagccctactacaacacagcttatcatcttttgagcttgggccaaaatgaggcagaagctctgttttcttaatactcccttaattacaaggagactgtttttaacattggtattaaatgggttgctatggcttcctgcctgagagttcagcatgccaagtttcagtcaggagcaagctatgaatgggctgaataagatcctcacaaataggtttcacagcccaaattcctaccacagagcatcccattaggaagattcctgggaggtaacagggagctgacaatggtgctgcctcccttcactttccaagacattccttctatggcttctcactaatcgccttgtcctataggatccttgtcctgtgtaacagaaagctgcttcaaacagaagcggatctgctgcctgctgcttccaagcacagaaaccatgtggcagtttgtttagtcctccaataggtttgtttgttccttgggcaatttcagcgttctcaaattttatatatgactgtgaccagaagggaagaaggcaaacaagaagttcaaagcagagttaaccatgcttagatacaggcccctgtctttggtaaacaatgcagaaaaaactactggggattttatctctgtgttctcaaagatagaaagaaccccaggtaacacaacccgcaatggtgaaaatgagcaaatgcagtccccagagccatgcgtatgtctaatatctattcagatatccaacaagccttctggcttcaaaattctccactcctctgatcttgtagcttctcatagggaccaagcctttgaaatttcatgctaggttttagtgatttcggtttttgtgaggaaaaaaagatatccataaggaacatatgcccgacatttgtggctgtttttgtaaaagcttagcctttgagagctgtggctactgtgttgaagagcaagctctggtcgtttccagagcttcatcattcagaagttagggtcagagcaaactgctgcaaaaggctggggaggggacccagacatgttcctggattcctttcaggatatttacatttacatgcagttaggcaggatgtgtatgagggagaaatagagggagcagagtaaaagtgggaaagaaagaaaggatgaaaagggaggaggaagggaaagaatgagaaaaacggaaggaaggaaggaaggaaggaaggaaggaaggaaggaaggaaggaaggcaggcaggcaggcaggcaggcaggcaggcagccaagaagaaaagggcggcagggaggaagggagggagggagggaaggagaaaagaggaatggtagggagacagggagaagggaaaaatgggaaaaaagaaaagataaatatgtacaacttttatgcatccataaaaataaagaaagaaaaaaaaagaaaagagagacgcggagggagagagggagagaaagaagagtaaacacagcaaagacatactgtaaaagaaggaagtgattttcaccatgtctttcattcagctgtgctgacctgcaggtgtagagaaggtgaaggagtttgtactctttctccaagaagtgatcaactcacacctggcagtttgacacaattacctcacaagctttaatactcattatcttggcttccacagatacaattgttttatggctccaagaataatgcactcctttcggaaatccagcagtcatgcctgggttggcgacctcctgaatcaaggaactgctaactggcaatactgagttctaatacaggtggccaacccaagacaatttactttgcatggggagtaggtggctatgtaatactgtgaagttaccagtaacatttcaattctggactgcggctgccagatataaatggctttatcattttgtttgtgattttgcagatgtggttaaagtcacacaaaggctcataccaaaggaatatgagctgttttttggtttgagacccagtaccaaattggtaaaatgagccagctttcagtaagaagtttttattatgtggacatgagataaatatttaacttgcaaagcttacttgcacgttaaacgtctatcacagaaaagggaaatacccaagtctttctgtctcagtcatctgtgggttctaaaaatgcacaaactagatggaacatcataaacacattttcaaaaggccatgcaaaaaaaccaacaccaggtggacacatcttcttgccacctcatcagcgggcataccacataaaccagaccagactcaatgctgaagaaaagtgacataaaagtctaagtgttcttttttgttttttgttttttgtttttttgagatggagtctagctctgtcgcccaggttggagtgcagcagcacaatcttggctcactgcaacctcagcctcccgggttcaagtgattctcctgcatcagcctcccgagtaggtgggattacaggcacccatgaccacgcacagctaatttttgtatttttagtagagacggggtttcaccatgtaggccagactagtctcgaactcctgacctcatgatccgcccacctcggcctcccaaagtgctgggattacaggcgtgagccaccgcgcctggccccagtgttctcattttgcaaattctttgatttttcagaaatgaatggatcccaacttgtttctgacacaacaccatttttcaaatagtttctctgattattcacaaggatttagaagagcaagcactgtaaacacttccaagtctgggcttgattacctagaaatgtatctagaatgcattctatcatttaatctaaaatctgagtcatcttgaggggaaaacacagaatcttataaaaaggataaactgcttttaagaacgtggatgtctgattttggatttgcaaagcaatgccaattacaagtgatctatttgtttggaaaaacacactgaggataaattctattagtaattaattcaacaataatatgaatttgaaaagatgcatgctccgctctctaaaaaagaaatcagtcagaaagtctacctcaaatctgccaaatcaatgaggttttatccctctgaagttcacagaattgtaacttttgacaaactttaccttctaacttacaactcaagcgtgctcatcacaccagagacactgctccaataacacgtgtctttctgctgcagcattttggaaaactgaagacttctgagggacaaagcacatgggaggtctgctaaccagacatggcaataattaatctcaaataccaaaattacaactgtaatgaccacgtcctaaagaggcaacagtggcctcagcaaaacagcacccctaaattgattgtaaagttaacagagcagctttgggcaaagtggggagttcaaacattaaagtaggattacaaattaattttttaaatttatcttgacacacttgaaagaaatttaagcaaatatctcatttttagacagcagtataaacaatctatattgaattttcttcaggatcatctttatacgtaagtttattgggatagtgatgtacttgtgacagatttctttccctataaaatatctctcttcactaataactgatgcctgcaattccatcatagacatttccattattccttacttaaatacaacacagggaaggggtccctatgcttgattaatccttgtaacaccatctctacagctgtactgggaacactttgatggctggaaccttgtgttttccttcttcgttagtattccctgcaggacctcatcctgtgctaggcgcttgataccacagaatcattcagctccaaggaactggacagatcgctgggctccgtcctttgattacaaagacaagaaggtacagctgaaactcagaagaaaactgagacttctctggagtgactcagccaattagtgacaaacctgggaccagacgtgtggagcccatagacagaaaaatttacccgtcaagcatttactgagctctgctgtgcactgggcattgtactataagctgaggacatggaatgataactacaaatacattgtcctgcagaagcttgtgatctaaatgagttggctagactcatacaccaatgatcacagcaaatctacctaagtgccattataaaattgagtccttaattagccctgttgattcaatctagggaagcttagcaattgagacatagaaatgatttcttttggaagatttcacctaaaaaaaagtactggaacttagattccacagacaggtctttagctgagattccagcaatttcgagttaactttactaatcagaatattttatttgcatttatagatgtgaatgaagagctcatacattttagtcatatactcaaaattaaagtcgtgttcattcatttttcagtcaatgtgttagttaggtgtgtatacaaagaatgcagacagaaatcctgatttgattcgttcttctgttcggatctaactagttaatattaacaagagctaagctattaacttttctaaaggattaatttgtacattctcttggatgatggtgaatctcattcaagtgagaaaccttactctattcaatttttcatgaattctctcaaataattggtttcaagaaatagcactacacaacatcttatcattttctagtcctcctgggaattcctaaatcatgtgacaaggacactaatcacaaaattcaacagggaagtggtagtaacatgaaatactcaacatgtagtctttgctttataggagcctccaggctccgtagatccttgagtgtccgttcgcctcgcttgctgtgataatttcccgtgactgctactttggtgatccttatataagcccagaagaaagtcttgggtttccccagtatctcaagactccacctctgtccctgtctggctagtttgctcatatctgcatctggtttatatgtgcctctactcaaatcttctagatttatctagtttcagagatagggaagaaatgccatgcttggcttgtgatctgacatgacagtgaccctttgctacctcttctccatgcagacgttatgggccatgggttcttttttactctgtacctccacacgaatggtggctgatttccaaggggctgaaagagtggagagaacattggatcaaaggcagccctctagtgtgtgtggtggtggtgtttgatgacttttctccttcctttggccaaatacaatagatagatagatatggatatagaaatatagatatctcactgcttgtcctgagattcatcccagtcttaaaatctattcagtcttctaccctctttcctctgtatgccatatgtctacatcatatccttgatattcataaaaggtcaaagcagataaagactcaggacccagccctccctcatgccgtgagcctctgtgccttccaccccggtgactcccacaggggcacacaccacagctatgacagaagcactgcagacttttcaagaaaaacgcattttaaagaatagtaatagtttcaagattttaatagaagcacagtacttcggaaatgaggcgttcaatgaacgtgtgatgaatgaaagaatgaatgaatgaatgagtggcaagcttccaagtgtgcctggggagtgaggtggctccctgcagaggagggacttggatggaagttggcccctttcccttgctctatgttgcgatggtaggcatctgaaacgatcctaggtcacatccagttgggtgagcctacttctggcatctgagagtggacagaaacaatttcagctctcaggggtgagccagtttaggtgagccagttaggttaatcaagagtgtgtatggtttatccacagcacttactggaatagagctttacttggtagtaaacccagtcccaccagcaacaacccttggtttttatcttattatagtgactgttattcatttcttcctttactcagtcattcatggaacaccttggaatgctcctttctgctcaactgtactgggggtataactgtgaacgagtcaaagctcctgttcccatttaagttctcaaatgatcacagttcttactgttctggagtatgacttttaactttctcaaacaattgcttttggctcttgcctcatctgatccttatataagcccagaagaaaacagaggctcagaagaggttaaagattttgagggtagcacatggctaattagtagcagagctgggtctttttttatgacatggagagctatacatagtttctattagccagtttcattttcctttcaacagaagccctgcagcaacacacttatcaacatgggcagtgatctttggttggaccttctctgggcaaaggactttggacaccaaatatgctttctgtaacaaccactacacccaattttccaatttttcatggggatccggtaaccatataggaaaaaggaggaaccatcttcctgctcctattatactaagactcatcctacttaattcctcatttaaaacaagaacttttgttatttccaaacaatattcaattaccaaagagtttctctggattaattgcaggacgtcactctcctttaggatagagcacattgtccatcagccccaccaaatcagtcaagagtgaagaaggaagatattgccagggaggaaccaaggcctaggagccctagctgtcactctcctcctcctcctctgaatagaaactccctctgggcacaagaacgggctctccaagaccttcagggctcctgggaaaagtgcttaaatccacaataccctctgtgatctgttttccatttgcagagggaaaaaaaaagtctaatgttggaggtttagctccatgggaaactacaactgcaaattgaatttttgaaaattaaatccaatttaaaatgcattaaaaactatttaaagcaatcttctggtgagtccttggttatatgaggaatctttctgggaagaagaaaaggcaatccctggtgtatctgttgtataaatctgggtttacaccaatagaatcttcttaaaacaaggtttgggggcctgaactgcaaaggggtgaaggctgacttggacaaactgattccatttatgtccagccttccaggtgacatactatagctcagtttagcacttaaaaattaactttaattctagaatttctgtaccattcagcacatgcatttaaggtagcaatgtaccagagctgaggattaggcccaaattagaagcaggctgaaaatactataagagaaccctgatgtttctgcctgattcaagttacactgacttccaatcatgcattttatcttttggcatgcttatgtaggtggccaataaatgttacctttggtgataataaaacaaaagccaaactttcataagctagaatatccaaaagaccattgtctgcattcttggcagcagccagatagccagttttcccaagtcagcagcctctgaggaggctggcgaggggccagttcccagggttggtgcattcctggggcctggcaagaggccactgggaccctgtttcctctttccttctctctatgtagtggaaaaatgttcccattttgacccctctgagtcttttttccccctatcggagcaaaggcagtcagatgggaaatgttccccagttcccccccaaaactcatctcccactgctctaagctggcagagcttaaagcaattgaaggcataagacaaacaaaggagggttcctcaggccagtcatccagcctgattctatcaggagcatggtgcctggagcaaggagaaccagcgggaccttgtgcacagggagtcattgtacctgtgcttggaagactatgggcacttctggaagcttttggaataaaattacctgttataaatagacactggctgggtttcagggttgagagcaagaggccaagatttccagaaaaatagaatgctccatataagagggtctggtgtacagctcattaataggggactgctgagcaattgaactaagaagaaaggaatttgaggttggtcagacatgacctgtagtaaacacctgggtaaacatttctggcagataacatcatggatatgctattccacttttaaacatcatatatatatatatgtaaaccaaacattaataaaaatcttttctgaatgcttccttccatgtacagacaaagaaagctgccatctggaacggccacatcagctggtccacatgtttccagggtagagaagtctgcatgccaggcatggtactgcatgccctatttgtgttgtgagtcctttccctaaattcactcaacaaccctttgaataagagacgatcacctctactaatagatgagaacacggaggctcagagaaggcaggtgacatggccaaactcacacaggcagtaggaggcaggttgggattcaaatccagttcagcctcattctccagccaactcatgctctctccactgcattacagggcatctatttccactgtgccctttaaaattagtgctttgcacacagcaagttcttaatacagctttcttcctgaggctgccactgctacttctatatttgatagaaattttggagtttagcagataggagctgcaccgctctcgtcataacaatgtatttcctttgcatagggtgccacagcctccaaaacaattccttgttctttatttcacttaatgacaacatccctcatcatagtgtcccaccattgaagacacagatattcagagagtttaagaaatgtgctaaaggccacacatctaccaaacatttcaactccagctctagtctaaggacttacgcagttctaatgcagtgatcgatccactagaccaccctccctgcacctcagcatcacacaacttttatcaggactgttgaagagaacaccatgtcactggttacatggaacttgtgttctgaaggtgccacatcaaattgtctggtgaaaccaaattgacaagtccaagggaatagactggaaaacaacacacaaaaatctatttcaaataaaatattaaaaatgggctagtgttttctcagcccagaaatgtgagaagagatggtggcagagtatattattttatagagtcaatgtgctggatacactcgtttggcctctccaaatctacccttcacccttccctgccctggtctgggcccagagcactctatgggccccattccctctggcttccaattgggttcagccagtggaggcaccaacaggggacaagacagtgtgaggagaatgaagtgggagtgttcacgtcccgatccccttgctgcagggccagcacggttggccatatccctccacctaagtggcatttcccgccaaatggttcactccttatagccacatggttctatagccactttctaggcctagtggcaatgactccccactgtttctagctgcaggaggctccattattatcttgttgcactttctatatcctgccaccccttttaaagaggccctttattaaactctcctccagtacctggcatgagtgtgcaatgtgtctccttcccagactttgatgcagtaaacaataaaacaatattactgattttgtctttgtagacaaatgatgggaagttactcaaatcctctaagaggatgagaaaggctaactactttagaccaggctctctctttcagtcacttccttctcaccacacctcaccaaacagaaattaggtcagatatcctgcctcagggacctaccaaactgggcccaggagatctccacatagctacctaccacacccacagtctagcccggagtctactccgggaggaaggcaggacaccactggcctcatcccagtctgtctagttggtgccttcacagatttcactctcagcgttcaccaacccaagctggatcactgccagcctcatggccactccatctccaaaaacggcaggcctctgcaaacagctcctcctcacagaaagggcaacagcccttgagcctacttatctgccggctctgacagatggaccccagaattcaccaaaccaaatgattttatttccctctacacatctatgtgcatgagagcagtcaacgaattaattgcattaggaaacctaccaagctgaaaacaactgcttaaaaccaagaaccaaaaaggtgcggaaagacagaaggcaagcaaacctcaggggcatattcggaaatggacaattatgatccattaagcctggttaagaaactgaaatttatgaggaagaaacatctggaactgcctggcatgtaaagaaaccaggaggaaccactttttgggcttagagggagcaggccagacaaataggattccatgttaggagagaattgcaaaattagtgtataaaaggacagaatggaggcagtgcctctggtgttaactgaagcgtttgaatatgatggctcctggatttccttttgaaatattaattgaaattgggctggagatgagggctgcatgaaaactggcagaaagatcataaatactggttaaagtgagccagaggaatggaacatggcaatgcaacacgaagtaatgagaaatactgctccattcatggccatgaaccctatggatgtctaataaatattaattgataaaaatgaactatactgctgagtggtaaattagtgtaagaaacctaggctgctgaaatacagctaatatatatacagtttgtacagcatacaccgatcaatgaatgagaagaaaagatatgaaaatgatttagctatgtgatgcattttgccttgcaccaggaattaggggtaagagaatgttaatagaggagtcaggaggggtggtcagagggggcaagaggaaagttaggacaataattcaagattatagtagaccttgcttagggtcttggcaatttctcatgtataagccaggcaccctggagtcacaccccattcttttagacactgtggctttctcaataaatttctgcttcagggaactcaaggacaccatagattaaatttggaccaatttattggaggaagatatgacagccctcctccttggggaagccctcgctgatcaatgtagccagaagaacaacttcctctttgtaaccccatcagccttgttgtttgcaccactgtatacctcctggtattctgaatagtgtatatgtgacaagattttttttaaagctttgcaaagcagaaatcatagtttacatttcttagcactcatttcactgtgtttcagaccaagtaggtactccattcctgtgctgatcaatgagaaactcgaaaaagaagagcaggctcttatcagagagaacacccagatgcctgttaggtttgggaccagcttctaaggggatcgatgaaagctctacctcctgttatggacaaagcactagagagtctgccatgggaacgatcctaggctgccagagaatgatgcggaaaactcagttgccatggaaacttgtatgatctgatgattcccattgttgaaagatggtgagacaacaggagaatgacaaacagatcttggagccctaagaacacatggaacatgccaagcaaacatctctactcatttgtacttatttctgctatagaagcagtctcatttcatcatctgtcaataacatagcatttataaaaggctttcaaaatgtgtccagttcctgtttttatgtagtgatctcagcgacaacaaggatgcacagaactacctctgatgctggcagacaacacttatcacagcagctgaatacagctgaatgaaacaggtgtcacccgagctcctgctccatgactccagcaagggaagccatccatgggcagatgctatggtcagcactaatggcacgtgaagctacctaacaatttttgcatcacagattcctgtgagaatctaattatacctacagactcactccccagaaaaatgtacaaatgcatataacataaaatatatcaaagaattcaaagccctggaagtcttttcataaatctcccctatcaagcaccttgggactcaagagaatccaggacaccatattaataatctctgatgtaaaacaaacaaacaaaaaactttacacacacacactagaatcatccttgggcaaacctgaagagcagcatgccatttcctctctccaaccttcccaaacagcaccctgggcctgctgcatgtgggccccctttatcccatattcagcacccccatgactgtgtatttggttcataagcagctgctcactgctaagttcactcactcattcattcattttactgagctttttctatgtgtcagactttaggaatacaatgtgaatatgacatggcccatgccctcaggaaacctacagtcaggggtgatttttcttctcagggaacataatggccatgtctggagacagttttcattgtcacaatgagggaggggtgctcctggcatccaatgggtagaagccaggtatcccaataaacgtcctacaatacacaggacagcgcccatgacaaagaatgatcaggtccaaactgtcgatagtgtcgaggctgggaaaccctgttctagagcacactggcctgtgggaatgtgaaaaggccagaagtaggtattatgccagctcaggaaggggcgtgttcataagaactccggaacatgtggcttcgatgacagcctgccttcttttcagagatgaaaggaaggagagaaggaagcaaaggagccattcagagtgagtaacaaccacaatgaaggtggatcctccttcaggcagtgtcagaggaggcaggaccaattgcaagtgctgggcagacaaatggcatttcttccagaatctcctcaggggaaatgctgctgaccctctactcacctccatcagtcagtggcccagcagagggaatgtgcagccatttgataggaccatcactcaagtcataaaccccactgcatgctgggggacggctagatgctggaggtgccccatcgctcaccaggttctccctactcttctcccattctagtcaataactccaccttgtacatgaacacgccataatcagttctcatatgaataaaaacacaaaattgtatatatatgggtatgtgtgtacacacacacatgcacgtacacacacacactattataaatcgcaatctcttctaaagttggttccaaggtctggttcatcagaaaatcacaagatcagaaaatagacctagacctacattctacattccttataagtctccccttcccacctccattcctttgtcaattgttttgctgaaaccaagtctggcttccctctgatctagactgttctaaactgcaggctcctcagtgggcacagatacagcagacgtgctaatgcacatggtctagtcctgttgaggtagctgatgctctttcacattgtgaagcaccgtgaaggagctcccagtcactggcataaagcaattttctgcttcagagctgttagctgtgcagatgcattgtagtctggggatagccccagacctaaagtgaaatcccaactctacctcttaccagttccattgccttgaggaagttgatgaacttgttaagcttcagatttctcatttgtaaaataggggtaattagagttcctaccttaaagggttgttgttaaatattaaatggtagtttccatataaagtattgagcagcatgcctagcctatattaagcctccataaatttcagctactattactaagggaaggaagccatcctggttgagacttaatgcatgattcactaagtgaacatgctgagctgtctgctaaagtggctttgatgttcgattctgccatcctcattgctgacatgctctatgtccactgcttggacctagtctacttccgtcctccattcagactgtccccagcaccagtgttgctgcagatctccaatggccctccaagacttttcgtgttaggatctgatctcttcccactcttttggggctccctcaagacttgcagcaagtagcacctgtgggtggtgccctcctggcccagcctcccctgcctcctcctagctcatctgctcccagctccatccatgggacccggagatctgcactgttggagaacaggtgggcagggcacctctcctgcatttctgtacctgcagtgatgggctgagctcggctggtggacagattcactgggtagatacttgtctaagggtctgacacgtctctaactccacctccacccactctcaagagggcacagtcaatatttcagcgtgacattttggaaaggttgctaaaccaggccaaagctagtctattccccaccagttacttttctcctaaaaatggccttcactagatcctcagatgtcacgccatcttctgatacctggctcaggccatggtctctattctaagtacatgtaagagacacagaaataatagacaagttaggggaaatgaggcagttggaggaaaagaaaaactccctcttgttctttggccctccctgacttgatgctcatttgggaaatctcaaaaccatcttgatatcagagaacaaagatcaggcttcccagaggacaacttggcaggttcccagtggccaggggcacagggcaaacggtactttatgtactcttccatcagtagacatggtcaaagggactgagattagactagctggaaaccttctataggaagctggtgttttgggctctgtgcagtatccctatggtaagaggaggtctaacaagagaaccatgagagtcaagaaagatccagtcatatctgaagcagtacagaataaagacttttgttttcttagtattcataacccactagctgtaggctgtactgagcaacaccagcaatacctctattttgcatttagaaaaagtatccgcaaggctgaacatactctatgtcaatattttctaaatatttagaaaaatgccttctaaatatttttctactattcttcctactggggtatatgtacctttgataacagcctaaacctgttcctctgcctgcccgcatatcacatatactgagggtaaatacaaatcactacttagaaaatcagcacccaggaaacgtaaaacaggactttcaaaattcccattgctctaatgcatgcggatagccattacaatccagcctagtgcctgtctttgtaattaaagtgtttttgtaaataaaatagctacatttgatcatgtgtcttcagaggcagctctcttcctacaacaaaggtgagcagttgtaactactcacgtggcctgcagagcctgaaatatttactatctggaactttatagaaagagtttgctgattcctgcttcagaattacatctagtcactaaatagaggggaaataactgaagataaacagcagagatttaaattcaatatgaggaagaagtttccctgggagaaaaaattcagtaatgacatgaattggcaccaaaggatgcaggaccaatatccttgggttgcctcttttttctctactctcagtctgcagttaccaaattccctctgacgcttcaaactacagctcccccatggcccctccatgtagttgcacagctccaactaccgcttccccatggcccctcctcacatcttcccagagtgacctcagcatctactactgtcagtgccacacagttcatttccatgtgatgatatttttcctgcttattaggacagcttccctagataaactagaagcacttgaggaagcctatccccctgtatcagccagggagaccttccaggaaagagatggcacactcaaagcatctaactgaggagagtttggtaaagggactgtttactgaattgtggacagagctaagtcaaaccaacaaaagatgggctaacaacaaccaagaaccattactatgaagaatcgttaaggtatgggaaaagaaaaggtgccagaacatagatagagcagtggttctaactatagctggagttctggggagagggttgtccaacaaaagctgcaactttaggcaaaggtgcccagttcctgtggtccatgaccaagcagggtgagagtgggagaacaaacacctcgacctctgatctcctgctaggagacaagtaggacctctttctcccattggctaaacccaaccagatgccaaaaggcaagtccatgtggtgcatcctccagggatgattggccaggtagagaaggaaaaagagtggatctggagggaaaatggaaaccatccagcacatccccatagctggttttcaatagtgcttgttgactgattgtgttatgaatgttgtggaagtcttgattactataacgatttggatacaaacagtcaagaggctgaaggttgaattcagggatgtgtgcacgtcctttttttcctctacaagcttataaaactatactgctgtcggaactgaggatttagtgtggcagtgtggcaaacgttttttcttccttttgtgggggagaagaaaagagggtaccaggaagaaattcatactgttactctcatctgtgcttaaaagctaaatgtatttcccaaaaattaaaaagagaatgtttgttacttaaatgtgagctggtaagaaagataactcatgctccagcatgctcatcagctaaatactaccacagctacaagtgtcaaacagctacatgggcagcccgggaatgagtcttgcaaataaaagagcacagtgtgaaatgatgactttttctgatcaaaaagcaccctgggaagggctgaacagttttgggtcaagaagaggactcgatttctggggtgatttttatcgttatcagagagtagactgtacttgccgtgaacgtatatacggctactccgcacactcctactggtggaggcaaacttgtagtcacttgtctttctctctgggcctttaacccccacaatgaaacatatttttcatttcagtttcacttacgtatcactttctcctttaaaagggtgaataataaagtaaaaaaatcaccatcaatgaatatttcagtgtgttaccagggcacacacacatggacatgtatatgtgtgcacacacatacactcaaaccctcccccatgccacgtgactaaggaccacaaacttgttttccccaattggagcttttttcagtttttggactgtgagtttctttattctgtgattcctccagtctaaaaatgtaaaagccattgtaagggagctataatttctactcaacacttcaatgatttgattatataaaataaaaagtgtaatgaagttaatagcaccttattcttgcaatacattatgagaatattttcctgtaaaatctgaaagtggaaattacctctgggccccctaactctcaaaaatatgtgtcatgacgattattgcaatggaattttaagacttaagaacgtaatatgtttctctttcctctattcagtttcccacaaggacatcttctgttcctgggatagtatataatgaaagataaagaacttaagtgacaggttgttctacttttggtgtaatcctagcgtgtgagctcaggaagagcagataacctctctgggccttaagcagtctgcaaagtgaggagacgagataaccgattttcactttagcattctagattcaaaaaataaaataaaaagcatgcattgggaatgaaaactgtactgtaatgccaggtttgttgttcttgttgttttcttgtatttcacagcagcccttatctagaatcttccctacctgcttcttgcctagtaatttgtgtggcttcagcataaagctgaagaagagggcaacatcttgagttcagatccctcacaggccaggcatctttgatctcatccctggtctagctttctttctgatacttggaattcattcaaggtgctttcaatggttcccattcccaaagaatcaactcaaaaagaatactctagctgctattctcccagaagtagcatcttatttgaagaagagaacataatactataaccgggggcaaaattgtagtaacttggcctaagtgctataatgttgaaaagcatttaagcacccccctacacactgtgataggaaaggacatcctttttcagaattttcccaatctgggcatgcagatgtaacacagtctgcctctaggaaacaaggaaaagatttcactagtgtaaaagctctcctaagcatgacacagggagacttaacaggattaagtctctcaggtggtgccaaacaagttctcattttcacagcgttcttctatgccagcaagtcaagaaacatatttgcagccctcaacaagtttcagggtacagccatatgccagaaagaatgcaagctcaatttagggttttcagctagactggtaatgtgacaggattttacttatgcccattttcaagctatctttaggcaaaatttaaatatgagcattgacactgtttccctttttccgatctgcaagtacctacgatccccattgggggttactcacgtccccctgccctgtcttgtcctgccctatccctgccttcgcagctatctgggctctgccttcttctattttaccaattcccacaacaaaattctgctcatcggtttgacatttggcagtgatccaaggccatttattaatgagtgctactatgaattattgaaagacaatagcttattatgtttaactttatagggtatttgcataaaacttgagatctgaggcagaaatctatggctttggggaccaaccaataccgatgatatttctgggttaagagaatctttcttgagctgctcacatcataccctacggctgtctctgtccttagcctaggcctaagacagaccctattggcatgctgatatgtaaaaagtgtttttcttctgcaaaggagaggctgagaaattatctctttatcccaggtttccccagaagttgaaaagggaatacacatacatatacacacagagacacacacacagacacccagacacactcacacaccaatgtcaccacgttcaacctggagttagcaagacgtaggaggtgagatggggtcagatctacggagaggagaacctgaaatacaccaaagttggcctctaaaggtatgctggtcaatgcacagaccaaatagacacagacattgattctgactaaggagagaagaacttgacataaatgcttaacacaatcctcttctcaagtcccagaaactcacatctatgaataatttgtgaggcagagcctcagccgctaagaggtaaataactaatctgtccgtgacagagcaagacctacagctgcaaagtttgaaaggtataacggataaatcaaaccaacaaatagttcattgaacccccactctgctagactccaggacaggtgctgagcatatacaagtgaataaagcacatccctataaaatgtgcacaaggaaccaagctaaatctctatttcagaaagtttgctttctatttcaagtttgcttgatttgattccttgctctgttcacacgcattgcgtaacagaaaaggtgacccacacatgttggcccagagactgcagaagaatagccaaccatcagacttagtctaaagtgaattagtctgtttcactggactaagcagattttcacaccggatagcaaacccaaccaggttgttaagaataatattcatcagcattaaaactctcagaaagttagtttacagacaactgaactaatgcacatacctaagaaggtctccaagacttcctctgctcttcaatatttgaacctgtattgaattcttgttcaacttacccccaaggttaagataaatgggggatggaacaactatacgtaggcttagcatttggcatcagctatacagtagtgtttttgtataggctgaagtctacatcagttgtaattaatgtaattatatataatgttgacagattatgacatttgcctattaagacactatacaaacattccaataatttgctggcttttgagtttgtaaaaaataaatgaaacaaaatctcaagggatgttgctaatggtgtaactggaagagaggtttcaaaagcacagcgttcaggaaataacagtcaaagaataatgcattcaaagccaaaacatatagagtggtaaatgaatatttagtacttaccacaagactgctgtctagagacagcctttttccaaagtcccttttctcaagctgtctctttccctccatggatgaagttatttattttcttttgtgacttataagaatcccccgtctgtttccagggtcactgaaaagagtgaacatgtgttttactatccaagtacacagtgtttagacctttgtttttaactctctaaccagaaacaagcattgaagtcaaaaaatacccagtcccaaataataagtatagaactaggctctctctactcaaaagaccactccgtgttacaaatgtcagagttgtctttatggcggcccctgtgtttttataggttttgctaatggagttggggaatgggtttgcaggttgaatcagcagactgtagaaaaaagcaaacagtccgtttcatgccacacttgctccacacccgtcctctctctatcagccagaataattctgttactgtgcacatagatgctgtctgcaaattccatgagatcaaaccgacaaaaccacgctctataaccaagagttattgagctcaaggcccaatgaagggaaactgaaacatgaacattgtttaatttaaaaaatatgtaatttaaaaatatttgaggaacattgtaagatacattcctttggggatagattgattcaaaatgaatggtgggtgatgtcattactgtcaatgagtatttatagaacccactgtatttttaccatattagatatagttcatccctgaactccactgagattgctttttctagaatgattaagtattctggttaataaggattcatcatatatgttaagtgccagcttccaattttcacaaagatgtaaaaggcttgaaataaaagaaatgggttacagtaaaggattttttttttttttttttttttttttttgggatggaatctcgctctgtcacccaggctggagtacagtggcacgatctcagctcactgcaagctccgcctccctggttcacgccattctcctgcctcagcctcccgagtagctgggactacaggcgcctgccaccatgccaggctgattttttgtatttttagtagagacagggtttcaccgtgttagccaggatggtctcgatctcctgagctcatgatctgcctgcctcggcctcccaaagtactgggattacaggcatgagccaccgcgcctggcccagtccaggatttcttatccactagccaagtgaccttggacaagtcatttaacctctcagaaactcatttttctcaactacaaaacatgatgatagcaatcaaatgatgtatgggaatatgatttggatgccataaattacaactcatatgtaagttataattacccacagattacatttaaaaacagttaacctgaaatatgagtcaatataattcaatatatccttgatgattcagaaggtgctttgagatatagaaattgctcataatccttgtaaataaacatagacattgtactgctgatgcagaagagatgaaatacaatgctataccaattaactttttaatataattggaaagaaatatgttccacaactctcaattgctccaagcctgacatggatcaaacaggcaggatttcatggcccacaggatgtgggctgtctctcttggttttcctcatcaagagggttgagacagtggtgcctgagatggggaatgcccaaactatagtcaatcatgagaaactgatgggctcatattccagcttaggcttcctcctccatcttagtcattttatctcttactttcaagaacactaatttttaatacatcactggtccactcagaaactcttaagagttcaatcagaatttaggataaaatccaaagttttcaatatcattttctaaaattctaggcagtatttttcagaaaagaagttagttctgtatactgctataggcatgaccactagtcaactgaaatttgtttgggaggctgccttttctactttcagctgttcctgcctactttgtagcattctccctctcccccagtctcagtgactgtaaacactggtagttcagaacaccctctgcagtgatgaaccagctagagactactctgaccctcatatttccctctccaccaaaaacacaccctcctaagtcttgatcccaaagagcatgggagtttgatagctcataatagattgtgctttggcctttagcacatatgcattgagtgcctactgtacagaagacagtaggaataccctaggaatactgtatggaaaacaatccttacatgttagtgacacagtcatgtacaagaaaaacaaagtccccgcctttgtggaactcatattttagtgaggcatatagaaaacaagcaaacaaacagctctaaactgtggtaggtacagtatgaaggaaataacctccagcaggtggtgccaaagtgccaagcggccgggcacggtggctcacacctgtcatcccagcactttgggagactgaggcaggcggatcacgaagtcaaaagatcgagaccatcctggccaacatggtgaaaccccatctctactaaaaataaaaaaaaaaaattagctgggcatggtggtgagcacctgtagtcccagctactcaggaggctgaggcaggagaattgcttgaacctaggaggcggaggttgcggtgagccaagatcgcgccactgcactccagcctggctggctacagagcgagactccatctcaaaatataaaaataaaaataaaaagagagagaggacccatttcttaggaagaaaatagccaggaagagaatgcgtgaaaaaagtcctgagttacaggcaaaaactacagaggcttgtaagctaatgtatctctctcagctcttatgctaaacacaaaggttaatcttaggttttaaattccctaccttactccctactagcaggtaacattcaacaaattatttaacctatttaagcttccactgcttactctatatgacagcattgataataggaccttcttcatagtagggttttctgatgattaatgagacaagccattgaaatagttaggctggggacagatacaggtaggtaagacttaaatattagatatattgatcatcccttctggcaaatatgattaaactcattaaaagcaactctagctactgaactttatgctccttcacaggcagatgaggctgtcattttgggaaatggggatccttttgatagttctcaaatagtccaatctgcctatgtggaaagctgatttaacagctttccaaatggatttggtccatttcttttcatattaatggtaccaataatataggcagatataatattcaaatgatttagcaacaatatggcataagggttggccaatcataaacgtacagtccaatcagggctgacaatggcaacaagcggtacagttagagcagtgtatcctagccaattcccagcctaactacatgtactggccccactccaagaaggtgaaaatttgtgagttagaccataaaacaatcatggaaaggttcagagtaaatttatccaagtggatcaaaggaagactatctaaaagaaacaaaatggcaaccaggatgcagcaatatgaaaaggaacctgattaacaatgaaaatatcagaaaggctgaaacattccattgatcgcactattgggaaaagactacatacatacagcagagactgcagatccaggggggaaatgagtatatcatatcctaaagatgcctgggattacctgggccatttgtaccatccatctaactcaactaattcagagactagtgtcatcaagtaaccttccaattttatttaattcctatgcagtatcacttatagaagaagaatgtgctgaccagcaaatatcagtagacaatcttttgaaaaactacatttctagtgcaaactaaaaatgacagtttgacatcttactctttatatttattatttacctatttggttagcatattagtcagcttgagctgtcataacagaataacacagactgagcggattacacaacagacgtttattttctcatagttctggaggctacaagtccaagatcaagtgctagcagagttagtttctggtgaggcctctctccttgtcttgcagatggacatcttctcactgtgtcctcacatggcctttgctttgtgtgtgcacatccccatgtctcttcctctaaggacaccagttgtagcacgttagagccccacacttatgacctaatttaaccttaattacctccttaaatgccctatctccaaatacagtcacattgggagttaggggttcaacatatgaaatttgcaggagacatggttcagtccataacagttattttcagtcaggtttcaaatcacatctgagtgttctattaatcaaattcctaagtctaaaaaactaagggaaacctccgagtagtggggcttatggtggctacctccagactccacacctctctgcttgttatgtgactgttggatcttactgccccctttccacctcaccttgccctgctgtactcttctctgtattgtgcatgtacagatgcaaacatgatcaagacttcttggtcagtgtgttaatgttgaattctgctaatgggaggcagtgagaggagattagaaggcaatgggaaagaagaagccattctgcttccagctctagcagaacagcatcaacagcaggtgactgcaggctccagcaacttctgtgattcctccaatagatcagctaagaaagggcaccagcaatgccccagtctgtgggtaccgccaccttatccctctggctcctccagccctttcaacaccatcataaaaattccttgcattaaatccctctttgcttgaaacatctacagtaatttcctttttctaggcttgacaatgtttgatgtgcaccccatggagatgcctttggaaaggcagcaagccttccttgggaaatacctggatttgttattgtcagtcttctgaaataatagtctggaattattttctaataaatactaagcctctagaggacagagagagcattttatgttctgtgttcccctaggtagtataacacctaatgcatagcacatgaagaacatttgttgcttgcataaataaatgaatgaatgttcacagctgtctttgtgaacatataaagagcagggcaaaaatacaattttgtttagcaaagtaatactagacacatttacaagagtgaggttgctttttagccaagcatattcggatacacccaagcctcaaagaaaacattttgtcatgattttgaaatgtcatcaacctaaaatctatttacctgcacctacaaagagccataaccgagtagtgttaatgtcttttctatgtcttccaacatctctggttataaaagaatacatatattcctcagagcaatgggttggaggcctctccttccctccgtggggaagaaaacggtcatggagttgaaagaagacaggaaattaagcatccttttattgactgatagttattgatactaatcttcccttccccctcacatacacccatctctagctagtgaaactacttctactcagtatctgtagaaatctaagttggccttaataactcttttttttttttcaattttttctcacagttagtaatggccttttcatgctagacagatttttaacctttctaaagatgtcagtaaattctattttctgatatacttcgttaacaggctgtataattttcaagagagtaacaaaaccgcaccattgaataaaatctcaaaggcatatcccctcacatacacacagtcacacacacacacacacacacacacatactcactcactcagacacacacacctgatctagacaccactttctccatctcaatttctgcctttctgattctgccacttcccatccctgctttcatatattaatggtattgccagaagaaatgcagaaaaacagtaatgccaaaagggctctcttgcttaggcattagaagatttggttcctagctttctttgccatgtaaatttgagtagattcctaacttctctgagtttacattttttatgcttttctcaccaggtcattgtgaggtttcaatgagataatgccccagcaagcttttccacatctaaattcaagatgttttccggtcagcttcgttaagcaacaaacaatgcaaaatataattttttgcagcctcataaacatcccgagaacagagactgtgtcaaattcattgttatattccctgcagcatccaacgcaccagctcccacacggtaggcatgcaaagaataactgcagagtagagcacatcaaggacaaataacaaacacagtaagtttcctgtcgttgacaaggcagctccatgggttttcaccctggttgtaccttagaataacctggggaactgttaaaaaacatatcaatgcctaggtcccaccagatcacttgaatctctggggtataggctgcagggatcagagtaaaaacagccagggttggcaaccatcagttaagagcagtggctgtcaagctttgccgcatgttagatggagtcacctggggagtcattaaggcccatccctagatggaataaatcaagatctctgggggtgggaaccaaacattattattttaagattcttcaatatttccaaggtgcagtcaatggaacaccagtttaggaaggtgaagatgtcagtcttttcttgatctccgtcctcttctcaaaggctgagggacacatgattgttggtagcagcaactacctttccttagccaccatacccaacaatttttaatctgcaaaccctgaccccaaagaaaagaaatgttagatacaaacaatttggataaatacctttatccgtatctccactctcaggctcatcattcaaaattaagctgcttaagctgatccttcttttcattaagaaaacattgttgactaaaggtagaaatattaaatctagattccaagttaatgtacgtatatcataaaacctcagagtgaggtcttcacgtagagtttcagggaaagaacttcaaatggcaagcccaatgttgcagaaaaccatgactcagatgcccccaaacccacgacctcctttcttcccactgctctccatgtgcacctagctctcttttcaaagtgctaccaaatagaatgtttgaaactccagtcctctttgtattgaaatctttttattctgatttattaagtccatagaaaggaaagcactggctttctgtatgctttaaacacgtacctacagcagtctcattttggaagatatatcagctcaataactttctcctattgatacagctatttgtggtataaatgggtaagggtgtgtttgtgcatgcttatgtgtatgtgtgtatgtgttgagtctgcatctgtgcatgtgtgttcatgtgtgtatgagcatgtgtgtacatgcgcatgagtatatgagtgtatgtgtgcatgtgtgtgtgtattcacatgcactctgacaacaaaaccacccccacacagaaaagtgttgtgtccattttgaatatgagtataaaaacatgccaaatgatgtaattttcaaccataaaaattttttaaaatcctaccagccccctgaaactgatttagaagaagattaaatgctaacaaatttcccaaatgtggtattcatccttgccagataaattagtggctggaaatagtctcagagagacatgacaacaacccttttctttcaagtggaggaaaattctgcatgatgttgaaaactggttttaaaaaattgtttcctacattcatgctcactaaacgtctcactaataatattcagtagcttccggttgatggtttcaatgccagacaggcccctaagaatcactttcccatgggcccctcctcagataaatggctatggccaacacagagaactcagggagctgcacaaagtctgggtctggaaatcttgtctatttttcaacatgcagctcagtgaactggagcagtaaaaaaattgctatgaatctgaactaagtttcttaggaagagaggtcagagaagagaggtcagagaaaacttccaatattcagtaatttctctcactattaaaacaaattattgagatataattcgtatatcatataatccacccttttaagtatacaattcagcgtcaacccttctaataccaatatttattcatttgctgcagaaactggggattatgtctcactctcagtggggacacaaagaagtttcctcatcacttcttgaggcctcatcaagccagctgtcccatgtcaccatcatcttgggtagcagcatcctggacaggcctgagttcacattctccaactgccacttacaagttctgtgaccttgagcaacttatttcacatttctttgctctagtttcctcactgataaaattaagataataataaaaatccccttaacaacgtaactctggggattaaaatgattcctgttttaaaataccggagtagatactctgttggtataatcactcaaaagagttccattcattcaaaattaagtaatatatattctatacctattttgtcccaggccctgtgttaggccctgaagattgaaagaaaaacaaaagaagaagggaggaacagagaaagggaatgaggaaggaaggaaggaaggaaggaaggaaggaaggaaggaaggaaggaaggaaggaaggaagaaaggaaaggagggagggaaggagggagggagggaaggagggagggagggaaggagggagggagggaaggagggagggagggaaggagggagggagggaaggagggagggagggaatacatgtcctcaaatttcaaggagacctaaaatgtaagagagggagatttatatattgattagtaaaatgcaagataaaataaacatgtgaatgaacaaatgaacgagcacatgatttgagcaaggaggattcactttttattgagctaaccctggaggacttgcctttattgtcattcctggtgttgccagctgatttccagacacaaactattgctacatcttcaatgtatgaactaagaatgaagaaacagaattgcatgggcttagaccagggtaagcgttttagctctggctgctcttctcaaaccatctgttccttctctcccactcttcctttgtaaagatctccccctgcaccaccactctttctttctttcctctgactcttctccatttattgccttaaggaagatttataatacattacataaaacgtctacatgttgcctgtgaactcctaaagggaaggtcggtatagaaacaaaacagataaatacattttataaataaataaataaaatgtacacataaccccagtggattggaagaatatttagataagtggctagggaaaagaattttcacactgtgtcatctgctaacattaatgagtgaattaaattagaaaaattccactgccaaaagcaaaaacatccaaatatgtgggatgctgggggaattatagaccatgctactaaatgcattctgttcaagcttactttttttttttctttgagcaggctgtggagagctacacttaaaaagccatccaatttcaagacagtattttccatctggggccagttgggtagaatatgctctaaactctgcaaagcctgctgagagacaacacaacttgttaagaaaactgtttatgaaaagggatgttttttgaaaatccagcaaaaggtttaactatgatgtccccacacattgcagaattcattattctccattgaatgtctttgtgcacaagtgaaacaccaaaatgactcaggaaatgagtgcagtacaataaattggaagccagtacatttttgctaaggccctagctggtaattagaatatttccaattacctaggagcttttttttccactttaagaggttattcattcttcatgtatagtaatctccctccacccacccaccccccaaaataatcccgatgtgaaatgctaaaagccaaatcaagattaagagattaaactttaaaaccaattaacatactgaaaacaataggaagaatttttagtgaaccagaaaatatagaatgacattaaagatgtcctaagtaataatggctgccaaaatgaaatgtatgagaaaaatctctaagatgtttatctttttctactcaatgatttaattaaattgagactgatattcatttgttgagagggcagcgggctaaactccctcaaaaaggtaaaacaaggccaggttcggtggttcatacctgtaattccagcactttgggaggtcaaggtgggaggatcacttgagctcagaagttcaagaccagtttgggcaacatagtgagacccctgtctgtaggaaaaataaaaaactagccagatgtggtggcacgtgcttgtagtctcagctacttgaaaggctgaggcaggaggactgcttaagcctgagaggttgaggctacaatgagttgtaataatgccagtgcactccagcctgggtgacagtaagtccctgtctcaaaaaacaaaacaaacaaacaaacaaaagacagtaaactagtcaatgaccacccactaaaatggatagctagaaagtagagttaggttttacacacacatatatgtgtgtatacagacatatatatatatttatactatgcatacatatacacataaatacatacatgtgtatatacacacacatatagtcatttcttttcttctgcttagaatttccacctagttttgagcaataaaaatcaaaacttcaattactgggcctttttttttttcccatgtgtaggttgtttctttttattcaggctttgaaggctcaggaataaaaggagttctatggatatttggacagaccagtgcttctcaaatgcatgcatgggaatcactggcagatctcgttaaaatacagattctgatataataaggctacagaggagcctgagagtctgcatttctaacaagctgatgcttctggcctgtgggttgtacttcaatagcaaaggatctgaaacttaaaacagagaacttatctatgtacatgtaatagcggaattccaagcattttctcataaagctatgcacagccagccagttcttatgatgacttagttctttgcagaatccaagacaactatggcttaggttttgccccatgattctcgtgttacccttcactcaggacatttggaatcctagaatcttaggtttaaatgatgccttcccggccccctcttcacctacccatcagtacggttactgcttctaagacaggcctcactagggcttgcccatctcttcttgccgcttccagtgacaaatgggtcacattgtctttcggaagagcccctttcacatttggctgtctcgaatgcctagaaagtttcaatttgtctcttggattttcacctactagccatagctctgttccctagagcaaatataatttttctcttactcaaggaaaaaaatcccaagtttcttccacattttctcttgtgagaaagtttccacagcccataccctcctagttacagcctttgaaatgttgtagaacttggccaatctatgagataatttttttttattttgtaaaaaacataccatattaaatgcatttattttctttgtaaaagatataagctataacaaatgtatatagagtataatatgaaaattgtatacttttactctccctctttctactcttctccgcagagatgcttttaacagtttttctatttgtttacctatatacatatatattgatttttctctttctatataagtggcattgacatctattgttccgtgactgcatttgttcacctgatatattcaacacctgggcctagttcagtttttacagcttcatagtactataaaacagattatcaataaattgcttattaacttatgggtagaaatttagatagttgtttgtgttttctgattctagaccatcccaccatgagcaagtctatgtatctgttgtgcctgtgtgagtttctctataaagcatagatctcaaaagatggaattatagtgtaaaattttaaatttggttagaaattgactaattgccttccaaaaatatttaagaatatgtaagactacctgttttccatagagttatcatagctgaacagaaccaatcataaagcttttacaaatttgttggtaaaataagtgacttcattgtctgaatttataatccatgattattggtgaagctgggcatctttgttttatgtgtggttatctgaactatttttctctggattgcctacttaaattatttgctcattctcctattgcctcttcctttttgagctctgaatacattttgaatattaactccttattaagagacattgcaaatattttccccccagtctacctcttgtctcttcactttgttatggtatagaatgttataattaatttgcagtcaaatgcatcaatcctttatgcgttctaaattaaaagaccattttccatatgtcttcctaatatttttatggtaccatctgaagataattttgtcttgtaaacctacgtaaagcataggtttaactttatttttaaaagaatataaattcattgattctgtgattaaagtattcctcccacggatttgaaatgcccccaatcataacaaaagtcaacatatgcacaatccttttccttgaccctcaagtaaaaaaaaaaataagctaatctatgcacctgtccttgtgccaatatcacactgctttaattatgagcttttagtaaattttgatgtcatataggccagacttcccatgttgtctgtttggaatttttcttggccatttgtgttcatttttgtcttccatatcaacttgagaatcagctcatcaggtccaacaaaaagtaccatataggtttttattaaattggattgaatttaaatttacagattatttaggagagaatttacatcattatattcttgagtctttccattcagcgacatgaaatgggtagtagattgtttaatggcaacaaattcctcccttcctatgatgcccaactctcttttgaaatgtgtcttttatgctcttctagcttaaggatggtgctcatttctccaccccttgaatctggtagggcttatgaaccttttgaccaatagaatgtggcaaaagggaaactgagttctagcactaggctttaagaggtcttgaagcttccattccctctctatgaaccctcaggctatcatactgagaagaagcccagtctagcccacaagagggtgacagccactggaggagaggtgacagccacaccaactgccagatacctggtcaaggccactgtgaacccaccagctatagtcaaatactgagataaacagaggctgatgagtgattctaggtgagaacaacaaaagaaatacacaggtggtcatcccatggaatcaggaggaaaatcagtcattgttttaagtaaccaacttattggggtggtattttgggcagcaacagataattaatttgggtcactgtgttgttcacatccttcagtaaaggatgtgaagactgaaagaaaaaaaaggaagaagggaggaatggtgaaagggaatgaggaaggaaggaaggaaagaaggaaagaatgtaaacagcacaatgacccaaattaataaatattttattaataacttatttattaatagttattgcattaataaattacttcaatcattaatttattgaattaataagctaattcaatagcctttgggcataatttctttagatactaagtatgttttattactcttgagaattatttacatttttttctacttactttttctaattggttataggcagtgccagaaataagcctattgattaataaactttaaacttctgcttaggtaactttctgagcactctttctggttctaaatgtgcttatttttttctactggatttttttacatagaaaattgcaacgtttttggcttttcctgtccgatacttacaagtcttgtttcattttctggtcatacagcattgaccagggaagcaagtttttagcagaaacttttgctcctgacttcagtagaattagtagtaatgtttttatccataagaatgggattgatttctttgtagctaccaattaccagattgaggaatttttttatacattcttgaatctctatagtgctttaaaatgtttcatttttaaaaagttaaacatactgaaaagtacataaagcaacagagattcatgtacctactaccctgtatttaacacagattaatcttgtgccatatttgctttaatctttcctctcttttaagtaataaaagcactgtagatgtagttgtagccccattcccctattctatcctaccttctctccagcaatagccactcccctgtagtaggaaagcattcttgctgtgcataaattatatttctactgtgtatgcataaacctagaacgatatacagcactgttttatgtgtgttttagtttatgtacatatgatagtctactttctatattcagttgtaattgtttttcacttaatgttatagcagcaagatttatccatgctgataagagaattctagtttatttttaaatactttaggaatcctattgaatggacttaaaacggtttaccccaattccaaaagaatgggtattagttgtcttacattttttaccattttcacattgcaaacagtaatgttgtgaacattcttgttctggcatccttggatcagaggcagaagattctttctcatatggggaaatccttgggtcacaggttgtgcacatgtttgagtgagaaggcagtgccaaattgctccccaaaaatgactgtactgtagcaatttatacttatatcacccatgttaaaagttcttgtttttctcttttattgaaaataaatgctcggttatttgggtagttggatcagatgggctctggcagtgctagatgaaagccagtgcccccaccctgactggattactgtttcctttacacatttattcagggttcctcctataagaaggagctacatttgacaggaaaatatcaggccaggcattagtctttctgagttcttcctttatttcagtatatatgtaatttttattgcctgcctgccacccagaattctttaatttttccccctaatttcacccccttcactatgaaattttaataccacagatttaccgaatatctgtttatgtacagatatgtgtggcttctgaaaggccatggactattatgatattttagtatttttcattgtcccaagaaccaatgctcaccttcattgagaatgtttctaagatccaaaatacttgcaggttcataatttttcagaggctagagggaggtggagcacaattcaacttgattctcttacataatcagcagggcttgtggctcttttgatcaaagaatgtggtaatagtgacaatgagttctgaattatttcactaggggcacactcatttaaagaagtaccttatggggaaaataaagagctgagtaattgggctaagtcagagattgcaaacccaaatgactaatatgttgggaaggtaacgtaaatgcgtgaagccgcccctgggagctgtgcccatctgggcaggacccatgcaaaaagggcagctggcatccaattgcagctaaaaaccaccatgcagaaaggaaggttcactttaccaaactcttcagtttttcgagagtcagaaatccagatcatctatgtaaaatctctcaatgtttgaagattagttcggtttttaaaaagtagttcacaaaccaatatctctgagaagtgtgcaacctatagactacactttgattacatgagttcttataaaccttcctctttctctaaagtttgatagttatttttaaagtttgaattaatgtaaaaccccaagaagaagagaagattgaagtctcaaatatgaacacaaaaaaactaggtacaggaaaggggaaggcagcctaatttaatttcccatcacctgcctgtgcaaatggaagaaactctaactttctattcaaagatgatttactctccttttacatgaagtcaaaatgtggaagcaattatcataagttatagaaataagttctgaaagcacaaaggttttttcttcttacattaaaattaaaattaaaatattacttgggttactgaataatttttagatattcatatatgacattgcagcccagaaatttgaaagtctctccttcaaagacaattttatttatttctttaatttaatagattacctaaggtatgtaagtacatgcctctgtaatctttcagttgtctatatgtctttctttcttgttagttttattatttgtctcctacacacacacaaaaaataaaattcaggtcacatatggatattttgacctggattggatatttgaccaattatctgaattatgaccacatctatacgtcacattttgctgtgtagatggtttcagtggaggttagaaaaatgttgatccattttggaaattaaaatataaggtgtgtatttttggttccataactacctgtataccttctgacaaattaatttctctagtcctcaatttcttaacctcacatatagagaaaaatgaagtaagcaatctctaagatccctttggccttaaaatattttgatcaatatcacaattttaaaagaatttaatgcctttaaattcattgcatctaatttacagctttattgaggtataactcatataccataatattgatccatttaaagtgtacactttattggtttttagtgaattcagagttgtaccactagtaccataatctatttttagaacatttttaacactccaaaaagaaaccccatacgcatcagcagtgcttctccatcccctaccccttacccagcccccggcaaccattcatctacattctgtctccatggatttgtctactctggacacttcccacacatagaatcatgataagtaatctttgtgactaacttcttccacttcgcatcatgttttcaggaatcatccatgttgcagcacgtggcaatgcttcattcctttttgtaattgactaatattctattatatgggtataccatattttatttatacatttatgtatatatttaccagtattggacaactgggctgtttccacatttttgttaaaacactcctgtacaactttttatatggacatatgttttctttactcttgggtatatacttaggagagaaattgccggatcaaatggaaactctgtttatcagtttgaggaaatgccaaactgttttccaaagtggctgcatcattttacattctcaccagcagtgtgtgaggattccaacttctccacatcttttcaacagttgttgctgcccaccttctttttttaactatagccacttataagtgggtatgaagaggtatctcattgtggatttgattcccatttcccgaatgactaataatgttcagcatcttttcatgtgtttattggctacttgtatattgttttaaagggttatgtaaaactagattcaggagatacatatgcaagttttgtttcatgcatatattgcataatgatgagatttgagtgttaagtgtacccatcactcaaacagtgaacaatgtacctaataatttttcaaccctcaccttccacctcccatcctccctccctttggagttctcggtgtctattatttccctctatatgtccgtgcatacccattgtttaactcctgcttttaagtgagaacatacgatatttgattttctatttttgagttatttcacttagggtaatgtcctccatttccatccttattgctgcaaaagacagtatttcattctatttcatgactgcatagtattccatggtgttgtgtgtgtgtacatatgtgaatatatagaatattttctttattaaatgattcattgatggacacttaggttgattccatatctttgctactgtgaatagtgccaaaataaatatgatataatgacttattttcctttgagcagatacccagtagtgggatttctgggttgaatggtagttctagttttaattctttgacaaatctccatactgttttccatagaggttgtactaattttcattcccaccaacagtgtaaaatagtttccttttctccacatttttgtcagcatcttttgattttaaactttttagtaatagccattctgactggtgtgagacattatctcattgtggtttggatttacatttctctgataattagagatgttgagcattttttcaaatgtttgttggtcacttgtacgtcttcttttgaaaaatgtctgttcacctcctttggccactttctaatgcagttgttttcttcttgctgagttgtttgagttccttgtagactctggatattagtcctttgtcagatgcatagcttgcaaatattttctctcattctgtaggttgtctgtttattctattgtttatttcttttgctgtgcagaagctttttagtttaattaagtcctatttgtctatttttgttttgttgcattggcttttgaggtcttagtcataaattctttgcctaggcctatgtccagaagagtatttccaaggttttcttctaggatttttatagtttcaggtcttacacttaaatctttaatccatcttgagttaatttttatatatggtgagaggtaggggtccagtttcattcttctacatatggctttctagttttcccagcaccacttatatattagggtgtcatttccccattgtatatttttgacaactgtgtcaaaattcagttgattgtaggtatgtgcctttatttctgggttctgtattttcttccattaatctatgtgtctgtttttgtaccagtaccatgctgttttggccagtatagccttgtagtataatttgaagtcatgtaatgtgatacctccagctttgcatgtctttttaagagaaatatctgtattccaaatatcaattcagatttttgtccattttaattgggtgatttggtttttattattgagttctaagagttttttttatatattctggttagaagttccttgtcacatataatatttgcaaatattttctcctatttcatggggctttttttctttcctgctaatatcctttgaggcacatttttttttaaattttactgatgtccaagctatctgtttttttattgttgcttatggttttgatgtcagatctgaaactattgcttaatccaaggcagtgaagatttacttctattatggaagttttataattttagctcttacatttaggtctataattcattttaagggtttttttggtaggtttgagataggaatccgaatttcctcttttatacatgaatctccaattatcctaacattatttgttgagaagattattctttttctcacagaactgttttggctcccttgtcaaaagtctattgactataagtgagagaattcatttctgcactcttaattctctacctgtgatgtatatgtctagccttatgtcagcacagtactatcttgattactatagatttatagtaggtttgaaattggaggtgtgaatcttccaacttcattctttattttcaagatgatttggctgtttttgatatcttgcatttccatatggaaattcatatgaattttgagatcaacttataaatgtctgcaaaaaaatccaactgggagattgcattgagtttgtagatcaatctggggagtagtgccatcttaacaatgctcagtcttctggtccatgaaaatttgatgtctttccatttattcaagtcttaatttctttcaacaatgttttataagttttagtgtacaactcttgtacttcattttctaaatttattcctagatgttttattctttttgttctatcataagtgggagtactttcttaattacagtttggattgtttattgcattgtatctccttttagcttcaaattgaaaaactagttcgtatttccttcattcattctaacttttttgttctttgctttaaaagatgcatttttattttagctgtaatatattttctagttttatttttaaatctttttattaagtcatgaaaagactcatagggttgtatacagtatatctgaattaaacaaattgagatgcttagcctcctcaattaaatcacttagaataaattataagacttccatcatctttcaccagcactcattaaacacttcctaaatgtacaaaactaacaatatcttagctgcccacatttgctgacaatgcatgcaactccatcaacaagcaaactgcatttaactcctataacctcagaaaaacacagttattaagagaccaaaacataaataccctcatcatttcaagcttgttgcttaatatttgcatttcattccattaaaggaataatttccattgactgccaaaacgaacaaaccattgcaccataaagccacattttaattttactttaaggggactccatgcaaacccttttgaaggcactactctactattgccttttaaaattatgctaacattgttgaaggtataaaatataattatttgtctcagaagagaaataaaagaaattgtggttactttgtcttttccttagaaatataatatgaattcaaactaaagaagtcaaattaggtgagtggctcttaaaaactttgagaatcaggggaaattaaaatacatttaatttgcagagatttttttagcctaatttgaaggattcttgattattctaaagccaagccatggaagaaatggacctcaaagtaaaaatcttccataaaataatagttgagttagatatgcaacttttgtaggtaaattccctggcatatatgaacaaataaacatttctgtgaacaaaaaaaaaactgagctcagagaaggaaaaggacaccgaagtcttggacctactgacttctgtgtccagagggacacaaaaatgggaaagagtttgacatcaagtatacatcaggcaccaaaagctttccataaatgttgggagacaaaggccagccagcttacttcatgaaaacatagtctgggaaaagggtccctcaatcttgaagaaggattgtgaaaactaattactgcctggggtcacagcttacataggatgttgatctgcatagtagaaggaaagacagtctgaaagataggtcttgaaccaagtcacttgatagctcagcttcatctgagatgtacctagtttttttttggtttttttttgtggtttttttgggtttttttttttttttttttttttttttgagacggagtctcactctgtcgcccaggctggagtgcagtggcgcgatctcgactcactgcaagctccgcctcccgggttcacgccattctcctgcctcagcctcccaagtagctgggactacaggcgccagccaccacgcccggctaattttttgtatttttagtagagacggggtttcaccttgttagctaggatggtctcggtctcctgacctcatgatccacctgcctcggcctcccaaagtgctggaattacaggcgtgagcctccatgcctggccccccagttttatattatagaatagatgcctcaagtaactcataaaacctagttctagttggggtgtctggtaagcttcccagaggcatccataaatcctctaggtgaggagaagtgtgcacagagatgagaggaagctccaattcaagatgaaattgacagtttaaagcacacaaaactaagaagacaagcaaaataaaaaatacagataattcaacatcaaacaaacgaaaacaatgaaaagctaaaactgacagtaaaaagaaataaaaaccaaaacataaaatagaataccaatcataaaaaggatgagaaatatgatacaagaacaggcaaataagaaacaaaaacaaatgtataggaagaagatctactataaatctacagaaaaaaactacggtctaaaatgaaatgccaataagacaaaatctagaaaagacaatcaaagggataattaatgaattaaaaacttatgctgatgaatccacctagaataaagcacagagagaaaagttgaagagaaaaaatatccattcaaagtctccaaaatgtatccaaggaattctgaaaagagaaaatagaataacatagaacaaatatcctaagagataagggctgagaaattttcaaaacagaagaacatgtgaaaaatactatacaggctgggcgcggtggctcacgcctgtaatcccagcactttggaaggccgaggcaggcagatcatgaggtcaggagatcgagaccatcctggctaacacagtgaaaccccatctctactaaaaatacataaagttagctgggcgtggtagcacgtccctgacagtcccagctactcaggaggctgcggtaggggaattgcttgaacccgggaggcagagcttgcagtgagccgagatcacaccactgcactccagcctgggtgacagagtgaaactccatctaaaaagaaaaaagaaaaagaaaaatgctatgcatatcaacatgtatactattaaaaccataaaaacctcaagtgaaagacaaaatcctaacacatatgagagatgttttttaaatgacataaaatgaaatcctattagagagctagactgccaggatatttctagttagcaaaaattaatgaatgaacacaagacaatgatgtaatcaaagtgtttacagcaaataactgtgaacttagaatttcaaattgagctaaaacataatccaagaatgagggaaaaataaaaactttttagacttactaaaaacacacgtttttaccttccccagacactcactaaaataatgaaggatatactttagcaaaaaatgagagagaaggagtagaatataggagattgcagtaagcaaagacatggatcaaacatgtttataaatctaattatctattgccattaaaaatagcaattgaaggccaggcacagtggctcatacctataatgccagcactttgggaggctgaggcaggtggatcacctgaggttgtgagttcaagtccagcctagccaacatggtgaaaccccatcactgctaaaaacacaaaaattagccaggcgtggtggcatgcacctgtaattccagctactcgggaggctgaggcatgaaaatctcttaaacccaggaggtggaggtgcagcaagccgagattggctactgcactccagcctgggtgacagcacaagactctgtctcaaaaaaaaaaaaaaaaaagaaagaaaaaaaatcacagtgggtttcaatgggtaagggaaacacgataaggtcttagtgttatttttaaagggtataaagatactaaataaatcttattctttgttataaatatataagtattttatatatatagacattaaaattaatatgcatgtcacaaattataaggtaaccactaaacaaataacaaaattatcaaatcaaatccaagcagaggggtagaaataaaaaacataaaaaattaaatccttttgaaggtaacttcatgaatttttgtctcattgtctttcctactttgttaaaacttttaattgaaaaatataatatgataaatttaaaatcacaatattttaaatggaaaagagaaaagtaaaaggattcaactaaagttgggaactacataaatgagaacaaaacatgagagcaacattcacagagaaaatagcctaatttagtaataaaattaaatcaaagatggctacaataatttaaatacattttatgcaatatatggtaattacatcacgatccttcaaactcattatatgctcatacagcctttagaaaaatcattgccaagattatttaaagaaacattcctgactgtatacataatatgtggactggaggcaaagaaagcatcataagcatctttgctcctttaggacttggctgagttctcagcaatggtagacagttaataattttttgttgaataaatgtttgccaaaaaaaaaataagaaaaagagtaaaacaaaaaaattagtgttaacattgggctgtaactacatgatattgactaagaagtttataaaggagatttttttttttaagtgtcagatctttcacaaaatagagagggctgggagctaggctgaggactaagtcgccataaacaatgccccaaaccactttgcaaaactaggctgaggaggaagctgctactgctgctgcctccaaaacagtttctcccatgaactccctcaataaaatgtccccacctgttcaataaaatggaagggtttgcacgggattgtttgcacacttgactcacttcaggactgaattctctcacatggtacatctggttggtggagctgagatcatatgcctgcatcccagttgtgaggctgaaaatttgagttctggtttcaatgttggggaggagatggttatatcatggggatgtccctaaacatagaaaagctgttcatgagatcacaagcagtcacgaacatgacgaatgtctatgacaatacagttacaaaaatgggaatgcatactccataattctccacctacagctacgtactaagtataatttaatgtcattaagtattcttccacagtaccatatttgaggactgcccagtatctcattaattggatgtcctataatcctataatgtgttttagctactccttattggacatgtaggtggtttccaaattatagtagcttaactttgggaaaatccacgatcatttgcttcaggtaaacggggagagattgctaatgtcctccaccactaccctgtcatcccacgctatccagttttaaaccttccttagccttcaagtagcaaacctcagaacatgccgccatatttcacagtgccagtgaaatcgcagttctcctttcctccctgctcacataaccagcagtggctccagtgtttgcacagactaccttgacatcttttacactgtgatcttcatcccatcaccatttgaggggtccatctgaatagctatgtattacgttcttgtcatctcctggaaattcttaaactctgcagactatacttctgatactcccttcacgataaaatctgaaggtcttctacttctggtgcagtattggcatatggataaaatcaggagttttaaggtggtgatataaaatcacttaagttagcttctctggtctctacttttcttatttataaaatggaaataacaacactatgtataccataggtaggatcataatactatttaccttgtagattgttataagtattaaatgagatcatttatatgaagtatgatatggtttaaatgttttgtcccctccaaatctcatgttgaaatgtgacctccaatgttggaggggggacctagtgggaggtatttgggtcaaaagtgtggatcactcataaatggcttggtactgtccttgcagtaatgtgtgagttctgattctatgagttaacatgagatctggttgtttaaaagacctggggcctcctccctctctctcttgttcactctctcgccatgtgatataccggctccccctttgtcttccaccatgattgtaagctcctgaggtctcaccagaagccaagcagatgctggcaccatgcttgtacaaccagcagaactgtgacccaattaaacttcttctctttataaattacccagcctctggtattcctttatagcaatgcaaaatggactaatacaaggtactcagcacagtaccaagtaagtgtacgagaaatgttagctattcaaagtaaccagataaaattgtctctttttgtaggtcactggaagcttcacatccaatagtattatttcagtctgatattatcactcctaagtttcaaaaatgaaattttcatcagcaccaaaacctctagtctattgactagcattgtggccccaggcctttggctttctccatctttatttcccctgtgggaaatgaaggtctaccaaaagacctacaaaatctaccaaatttggggtctagaaaatcagcctcacatgctccttatgaaaactgtatctttatttccctaaaaacaatcaatacttatttcttcctttgtgtgtctacaacttgttccccttctggggtacttcattcagtcttggagtattacagtgtggactcacaagcaagtggtaggtgtttgcttgtctgtctttcccactagattggttcccctcaagaacagaagccacagctcatttatctggttatctctatcccagtactgaatatctagaacaagcttatcttgtttgaaatgaagttaaactactgagcaatggatttctttgcaaataacttatgctgcttcatgactacttagaaatagctgatgatttgtatcttaacagcgttgatttgtatcttgaattaaaattgccatgtctggaaactgatgcacccagagaaaaactgagatttcattcctcttttatattacctttggttacctcaggttacttatttggaaaaaaataaatctctttttcattattccatgaaacattccttcagaatattctattattaaaatatatacaaatatacacgtgtatacacaaacacacacaatatatcattctttttaaaaagtaatcatgaatatcttcttaaagtaaaaagttaaaattatgtagaaacctacatggaaaatacatgtacttatttaatatgtaagctttttaataaacataaatgataccctattatacatatttcttgacaatttgattttttccccacttaataatatgtcacagaggtctttccatgtcaagataccaatagctcttcttcaattctttaatgatgactcgggctccatcgtgtgaatggagtattatttgtttgattttttccttccctgttgatgggcacttcactgacaaataacttatcactattacagatgctactgcagtgtgcattcttgtgcatgtctcttcacacaaatggatgaactgttttctaggataaatagctaaaggtgccctttcctttcaaatacaaccaaatttctattaatctaaatcactgtctccttcctgttctatcccaatgattacttatactttcagttcagaaaggcagagaatgatgcccacaacttcccagaaatgtaactatcagccttcagaatcaaattcacatctcaaagtctctcctgcctatagaataattcatttgcaagccactctgatcaatatcattaacccagaactcccatgaccccatattattcacagcctcatcttaagggtagttctccatagttttgaaagtctgtttaaggcaggcaggaagacagaactcccctgggtccctacaaaacgagggcttatacaaagtcctgatcaggcactgggagggacactcaaaaggaaagagatgtagaaccaaataacagaggcagctagtgtggacaatctcaagctacaatcagttttttcttcatctatttttcttcattatctcttttagaatattaaactttttgctcatgctattcttggcaagattgcctgcctagttctgcttgaagtcagtgtggcaggagatgcagaaacagccaagttgggtgaccaaattcacaaggtgcacctagctagcggaagctggctgacgcgtttggtcctctacttccctctgccaatagtttgcgcagatttaggaagctgctgtccaaggcagagagtgaaggagatgacggaaactgaaagacaggtatgacctctaaaaatatgcatatttgtttccattgatcagcatcatgatacagagtttgataggctgcctatctgcctgtgggctctgccatcccacaagggcaggctccaagtcgaatctacctcagtggttaccgcacctagcacccactactagatctaacaatctaccttgttataatgctttcattggcactcactaactatgtatctacctggcctaagaaacaaaattgaaacattttgaagttatgtgtgagaatttcgtaccttacaagaagatagcatagaagggaggaggggagaggcaggattcgacagtccaaacgcttatcttttacaatgataaaagatacataatggcttaagcataatcccaatgacattggagaaaatgatacacaaacctcttcatcaggaaaatactgttgtttttgtagaagattgataccgtttgctaaaaatgccctgaaattattttggtttgttatggtactagattcgattagtttaatttggaaatctgagccggaacaaaataatagtctggttttgtctaactgaaagggcaaaaccagaaatgctgaaacacaaatgcattgctcatatgcacacacacaccccccacacccccgccttgcatgtgtacgcacacacaaacacacagactcagaacacatcttaaccatgcccaactggctgagctcagatcttcagatacagtgaagtacatccaagaggaagccaaaggtgaaaaagtgcccccactgaggagtatctgagtgaacagatttgcagaaaggacaggagaaagagaaagagtcaggaaactcattattgcccaagagattatgtattttcaaaacggtagaaagggcttaaaaggagtatttagaagagtacaatttatcagattttccacaatgactgcctctgtggaacttccctggagcattcttcagctctgtgtgataaacctgccgtcctgctcatgtatactccacttaccagatatacaagctgcgctatagagtttcaagggatatcacgcgatgtgtgctttgacataagggcacggttatcctgaatgtggctcattcagtggggctttggaagagcagagggcagtgctcaatgattgagggatgcccccaccctgtgcctagaatatgcctgttcccagcaccagcaggcaaaaacaaaacaaaacaaaacaaaaaaacaaaacaacaacaaaaaaaacacttggtgtaaaaccatttcaggcatatgaaaactctgagagacataatgagccctcccattaattctacaaccctatctaggcattctgctaacctggaatgcttgggtctaggaaaaagagcaattctttgtccaatgcttcaaaagattgagaaaggggaggagccaagatggccgaataggaacagctacggtctacagctcccagcgtgagcaacacagaagacgggtgatttctgcatttccatctgaggtaccgggtttatctcactagggagtgccagacagtgggcgcaggccagtgggtgcgcgcaccgtgcgcgagctgaagcagggcgaggcattgcctcacttgggaagtgcaaggggtcacggagttccctttccaaggcaaagaaaggggtgacggacgcacctggaaaattgggtcactcccacccgaatattgcgctattcggaccggcttaaaaaacggcgcgccacgagattatatcacacacctggctcggagggtcctacgcccacggagtctcgctgactgctagcacagcagtctgagatcaaactgcaaggcggcagagaggctgggggaggggcacccgccattgcccagccttgattaggtaaacaaagcagccaggaagctcgaactgggtggagcccaccacagctcaaggaggcctgcctgcctctgtaggctccacctctgggggcagggcacagacaaacaaaaagacagcagtaacctctgcagacttaagtgtccctgtctgacagctttgaagagagcagtggttctcccagcatgcagctggagatctgagaaccggcagactgcctcctcaagtgggtccctgacccctgacccccgagcagcctaactgggaggcaccccccagcaggggcacactgacacctcacacggcagggtattccaacagacctacagctgaggttcctgtctgttagaaggaaaactaacaaacagaaaggacatccacatcgaaaacccatctgtacatcaccatcatcaaagaccaaaagtagataaaaccacaaagatggggaaaaagcagaacagaaaaactggaaactctaaaacgcagagcgcctctcctcctccaaaggaacgcagttcctcaccagcaacggaacaaagctggatggagaatgactttgacgagctgagagaagaaggcttcagacgatcaaattactctgagctacgggaggacattcaaaccaaaggcaaagaagttgaaaactttgaaaaaaatttagaagaatgtatgactagaataaccaatacagagaagtgcttaaaggagctgatggaggtgaaaaccaaggcttgagaactacgtgaagaatgcagaagcctcaggagccaatgcgatcaactggaagaaagggtatcagcaatggaagatgaaatgaatgaaatgaagcgagaagggaaggttagagaaaaaagaataaaaagaaatgagcaaaacctccaagaaatatgggactatgtgaaaagaccaaatctacatctgattggtgtacctgaaagtgatggggagaatggaaccaagttggaaaacactctgcaggatattatccagcagaacttccccaatctagcaaggcaggccaatgttcagattcaggaaatacagagaatgccacaaagatactcctcgagaagagcaactccaagacacataattgtcagattcaccaaagttgaaatgaaggaaaaaatgttaagggcagccagagagaaaggtcgggttaccctcaaagggaagcccatcagactaacagcggatctctcggcagaaaccctacaagccagaacagagtgggggccaatattcaacattcttaaagacaagaattttcaacccagaatttcatatccagccaaactaagcttcataagtgaaggagaaataaaatacttcacagacaagcaaatgctgagagattttgtcaccactaggcctgccctaaaagagctcctgaaggaagcgctaaacatggaaaggaaaaaccggtaccagccgctgcaaaatcatgccaaaacgtaaagaccatcgagactaggaagaaactacatcaactaacgagcaaaatcaccagctaacatcataatgacaggatcaaattcacacataacaatattaactttaaatgtaaatggactaaatgctccaattaaaagacacagacgggcaaattggatcaagagtcaagacccatcagtgtgctgtattcaggaaacccatctcacatgcagagacacacataggctcaaaataaaaggatggaggaagatctaccaagcaaatggaaaacaaaaaaaggcaggggttgcaatcctagtctctgataaaacagactttaaaccaacaaagatcaaaagagacaaagaaggccattacataatggtaaagggatcaattcaacaagaagagctaactatcctaaatatatatgcacccaatacaggagcacccaggttcataaagcaagtcctgagtgacctacaaagagacttagactcccacacattaataatggcagactatacattttttttcagcaccacaccacacctattccaaaattgaccacatagttggaagtaaagctctcctcagcaaatgtaaaagaacagaaattataacaaactatctctcagaccacagtgcaatcaaactagaactcaggattaagaatctcactcaaaaccgctcaactacatggaaactgaacaacctgctcctgaatgactactgggtacataatgaaatgaaggcagaaataaagatgttctttgaaaccaatgagaacaaagacacaacataccagaatctccgggacgcattcaaagcagtgtgtagagggaaatttatagcactaaatgcccacaagagaaagcaggaaagatccaaaattgacaccctaacatcacaattaaaagaactagaaaagcaagagcaaacacattcaaaagctagcagaaggcaagaaataactaaaatcagagcagaactgaaggaaatagagacacaaaaaaacccttcaaaaaatcaatgaatccaggagctggttttttgaaaggatcaacaaaattgatagaccactagcaagactaataaagaaaaaaagagagaagaatcaaatagacacaataaaaaatgataaaggggatatcaccaccgatcccacagaaatacaaactaccatcagagaatactacaaacacctctacgcaaataaactagaaaatctagaagaaatggataaattcctcaacacatacattctcccaagactaaaccaggaagaagttgaatctctgaatagaccaataacaggagctgaaattgtggcaataatcaatagtttaccaaccaaaaagagtccaggaccagatggattcacagctgaattctaccagaggtacaaggaggaactggtaccattccttctgaaactattccaatcaatagaaaaagagggaatcctccctaactcattttatgaggccagcatcattctgataccaaagccaggcagagacacaacaaaaaaagagaattttagaccaatatccttgatgaacattgatgcaaaaatcctcaataaaatactggcaaaacgaatccagcagcacatcaaaaagcttatccaacatgatcaagtgggcttcaaccctgggatgcaagtctggttcaatatatgcaaatcaataaatgtaatccagcatataaacagagccaaagacaaaaaccacaggattatctcaatagatgcagaaaaagcctttgacaaaattcaacaacccttcatgctaaaaactctcaataaattaggtattgatgggacgtatttcaaaataataagagctatctatgacaaacccacagccaatatcatactgaatgggcaaaaactggaagcattccctttgaaaactggcacaagacagggatgccctctctcaccactcctattcaacatagtgttggaagttctggccagggcaatcaggcaggagaaggaaataaagggtattcaattaggaaaagaggaagtcaaattgtccctgtttgcagacgacatgattgtatatctagaaaaccccattgtctcagcccaaaatctccttaagctgataagcaacttcagcaaagtctcaggatacaaaatcaatgtacaaaaatcacaagcattcttatacaccaacaacagacaaacagccaaatcatgagtgaattcccattcacaattgcttcaaagataataaaatacctaggaatccaacttacaagggatgtgaaggacctcttcaaggagaactacaaaccactgctcaaggaaataaaagaggatacaaacaaatggaagaacattccatgctcatgggtaggaagaatcaatatcatgaaatggccatactgcccaaggtaatttatagattcaatgccatccccatcaagctaccaatgactttcttcacagaattggaaaaaactactttaaagttcatatggaaccaaaaaagagcccgcatcaccaagtcactcctaagccaaaagaacaaagctggaggcatcacactacctgacttcaaactatactacaaggctacagtaaccaaaacagcatggtactggtaccaaaacagagatatagatcaatggaacagaacagagccctcagaaataacgccgcatatctacaactatctgatctttgacaaacctgagaaaaacaagcaatggggaaaggattccctatttaataaatggtgctgggaaaactggctagccatatgtagaaagctgaaactggatcccttccttacaccttatacaaaaatcaattcaagatggattaaagatttaaacgttagacctaaaaccataaaaaccctagaagaaaacctaggcattaccattcaggacataggcatgggcaaggacttcatgtctaaaacaccaaaagcaatggcaacaaaagacaaaattgacaaatgggatctaattaaactaaagagcttctgcacagcaaaagaaactaccatcagagtgaacaggcaacctacaaaatgggagaaaatttttgcaacctactcatctgacaaagggctaatatccagaatctacaatgaactcaaagaaatttacaagaaaaaaacaaacaaccccatcaaaaagtgggcgaaggacatgaacagacacttctcaaaagaagacatttatgcagccaaaaaacacatgaaaaaatgctcatcatcactggccatcagggaaatgcaaatcaaaaccacaatgagataccatctcacaccagttagaatggcgatcattaaaaagtcaggaaacaacaggtgctggagaggatgtggagaaataggaacacttttacactgttggtgggactgtaaactagttcaaccattgtggaagtcagtgtggcgattcctcagggatctagaactagaaataccatttgacccagccatcccattactgggtatatacccaaatgactataaatcatgctgctataaagacacatgcacacgtatgtttattgcggcattattcacaatagcaaagacttggaaccaacccaaatgtccaacaatgatagactggattaagaaaatgtggcacatatacaccatggaatactatgcagccataaaaaatgatgagttcgtgtcctttgtagcgacatggatgaaattggaaatcatcattctcagtaaactatcgcaagaacaaaaaaccaaacaccgcatattctcactcataggtgggaattgaacaatgagatcacatggacacaggaaggggaatatcacactctgcggactgtggtggggtggggggaggggggatggatagcattgggagatatacctaatgctagatgacgagttagtgggtgcagtgcaccagcatggcacatgtatacatatgtaactaacctgcacaatgtgcacatgtaccctaaaacttaaagtataataaaaaaaaaagaaaaagaaaaaaaaaagattgagaagcgggtggggcaagccatgagggggaaagaaagcagatgaacgaacactctttttacagaacaaatccctttcttatcagttcaaccatcaatctttagttttctgaacactgttgctatatgctcaaattgtccaaggtatgatgagggcatgaagcaagtagaagtcagagcccaagttttaaaaagttttactgttgtcagggaaacaagattcatgcacattaaaatattagagtacattctttttctgtttatgtacttatttccaacctcattcccccaaaggatttgtgattacttacaaaaatacacacaaaaaccaaatgataaaataaataaaaagtaaacgggcaggatataagtgggaaaataataaaactatggtcaagataaatacaggaatatacagtatgctgtccagactagaggtggactataagttttgaaatccttaagcacaggcagtaaatcgcactgggcgctctatgcagagccaactggtatgaatatggcagagcaatgagttgccaaacctagctgtccagaagtgtcacttattaaaggcttccaaaaactccataatgaacctgaattcctggggcaggcaggcagggaaggaatgctgggaatctgcatttttaatgtcgtcagcccaaacttgggaaccacaactgcagggatttggaaataggggttgaaaaagaactcaaaaaatcagattccaggaattacggtggttgtggatctgaagcagggcctctaaggttagatggagtttaaataggtggagatgatgatagaagacattcccagtagaagtgtgggctagagccaaatcacagaagcaggaaggagcctgaggccatgaaggagacagcatcatccctagtcaccctggagcagtagtaaggggacttaggacactaatttattgctcaacccgctcaattttgatcaaatcccaaaaataattaaagaggctatatacataataaatgagttatatacagaaatagagatggtaagaatgtatatatttgttatctattgctgtgtaacaagttaccacaaatttagtggcttagaataatacacatttattatctcacagtgtctatgaaccaggaatctgagcagagcttagctggaacctctactcagttctcacaaggctaaaatcaatgtgtcaagtgtcagacctcaggtgtctgggatctcatctgaggctctgggtcctctcccaagctcatgtggtttgaggaagaatttatttccttgcttgtggctgtaaagctcatgatgacttgcttcttcgaggccagcagcagaatctctgaggcttctagtttctgacctgtagataatcttttaaggagcttgcctgatgaggtcaggcccacccaagaaaatctcctgtttttattcactcaaagtcaactgattagggaccttaattatacctacaaaagtccttccacaattgccatataatgcagtctaatcacaaaagtgttatctgttatattctcaggttctgtcctcacttggggagggaatcgtacaatggggacctggatcttagtttccatcttaaaattctgctttgccacaaagtacaaagtaaagatgagagaaaaatgttgcaaaggtaaggtatatgaaccaacagaacattggtaattacacatgtcaatttggctctgagcttcccagcagttgaagtacaaaggagttatgacccagtgatttcttagtactctgatcagttcctagtactgacttatacaatatatttctcatgtctattagaaatcatgaaatacagcatcaaaataaagtgaaagatacaaaatgaagtcagatggaatttgatccaaaataactctttgccaagtatgggatatgttgaccctaccgatacaatgggaaattggcaatgacaagaaccaagttcattggggtgcttggtcaatatcaggtaccatgggctggtgattggggtccctataaaagaaatcagctgtgaagacataccaggagttgttccaaggcaaggggggaaactgaagtcacacatgaactgaagttacaagtcagaggtatctaggtgtggaggagatgagagcagaagttgaagcactgcatagctaccaaagaatcttgcagaaaggttaccctttctgcaaccttggaagtgttcttgttgtcttggtgttatttggccacctccctgtggaacaacttttccccgggacatcttaagggcatcacttgatctctgtcagagctgatcaaacatctctgctttgctttacaattctcataattagttctaagcattcggtagcatgaactgcttcaccctgtgttccattgggactctataatgaacctgcttttgcatgcaaaatgctgttctttcttccaccgactaacatattatctctttttatgacctcactcaattccaccactgtctcccttccttgaatggctctcgtctactcacagagtcagcactgtctgtgtaattgctctggcttaagtctggtcttctacaatctgactatctggtccaccacaatgtcctcttcattttctttcgtgttcaaatttccctggagctcactatattgcatatacaaggcttatagatcaaaaaagccttggaatcctccagctcacctgcctttgcaatgaagcccattccagcattgtctgaggacttccagggaaaagaatctttttcataagttctcaccttgtttctaaatgaacaaaagttcttcctaatattagaccacagtaacttctctttaacttccattcttagtcatagtgctgctttcttgagtaaattaaaataccacacttcctttcatatattgttcctgggagtataaattggtataatccccttgaaagactgttgggcattagatctgagatactctattattgctatgtgtagcaattacacaagcactcttaacatatatgtgtatatttgtttaccaagagacatgagagacatgtgccagcatattcataatagaactatgtgtcatggtccaaaattggaaaatatccaaatgcccatccatagtaggaagactatatggtggcagagtcacacaatggaatattatacaacaatgtgcataaagttataattaaacacagcaatacagatgaatcacacaaacataatttgaaggaaagaagccagacacaaaattacacaaaccgtatgattccaattagataaagtacacaaaaggccaaattaatctaagccactggaagtcagtatggtggttaccttagagaatgtgactgaaagggaatttgaggaaggcttctagggtgctggcaatatttcttgttttgaggattagtgatatgggtatattcagtttataaaaatttatcaagctttatacttaggtgcaattatctgtatgtattttatacttcaataaaaaaggttaaacattttcctcttccaaatgtcccaaataaatctaatttatttagccatttctaatatgatatggactgtagaatgttcacgatcctagccacctacttataaaaacttttcatttgtcaaacctctgatcattcatttggaacttaatcctactgattggtgtgtagtattctttaaacgccccacgtgggattaactccttctccccactatgttatgaaacccataaagataaatgttttcccctttgattttccagtagcatgtgtattcagtgtagattgtacactaagaaaatactcatcttcccttctcttccttagcaagtgcagatgaaagtggagattgaatttacataggacctatttgataaaccaattcaagaatctttcttttttatttcaatgaaagtttaatgctaatgtattcagtgaagccaagttttattttgcttattttgctctctgccctcaggctgattgaggagtgacctttgccttgatttatgacagacgtttgggtatggagagatggagactactattaagcagatccctctaaaagatctgagtaagtatttcttatttccattcctctcatcttcattattcataaattcttccaatgtctgaaacccttccttataattttctcttctcaagaaggaacatactcatttggacaatgagacaatgagaaagaagtcttcttattcctgtagttagtggtatcatccttcctgataagctcaatagagggtaaaataaatgagcaacagaatacaaaccacatgcctagcaatggagagaattctaggttctaaataatgaaatgaaaataatatttttggtgctgataatgctcctggccgatagcttgtctttccaaaacaaatatcataagagaaatctgcagacattcacatcatgaatgcggtttttctctctgcacacacactcatttgcacgcttggcacctggaatgcttggttggtacacagtttgctgaaatttcctttcccatttggcacaacttttcctagataacattcatgagcatcagtcacctccacaaatagcaaagagagaggccagcttcttggccacattcatattcctgccaccaggacacctttataaccatacttcagactacacaagcacagccctcgcctgcccaggttttctatgtataaaaagacatatgaacgaaagagagagagagataatgaaattatgagtctgcagattcttaccaagcctgttgaggaactatctctacaaaattgaagacatgtcagtcccttataagatcatacaaaacatagagggaaaatctaagaaagctactcatgcagaaactatttaatcaaaggagaaagacaattataacatctgttaatcttctgtagaggttataattagatgctttggagaaacaccctttcaagggtgatcctttaacatctgttgtgaggacacacagcattgtgcagtgacgaatcacctcggcactttgggaaaacaggggactactgggatcacagacactgccagggtccccaggctgcccttgcatgcagcccagccctgagcccactgccctgaggtgggggctttcctccttggtgctttgataattgcctgtgttgtgaatcaggctgcaatcattgtgtgactatgaataacaggatcacagcactggaaacggccttgagaccatctcatcttctcccccttcactttgcagatgggaacacttgatcctatgtcctttagctggctcatggcaggattttacaaatagaattgttcaatctctctgttcagattactctccactctaccatgctgcttgctccttttggtctccctttcgtttggcctgtaatgtggatgtgttctttgtttaatgagatgagcattataataaagtcctagggcatttgaagattatggagaggtggtctttttctctggtctctggttcattaagagacactgaccatggtcccttctttgctctggagaggaggaggaggacgagcagtagagataaatgaagatgaggagggagaataagagcaaaagggaggagaaaataggagaggtgagatgcaaatggtgtagagggaagaacgaagacagaagattgagaaataaggtggcatagacagagagatgtgaaagaggaagggagcagccagggaagatggtccaggactacagaaaaagggtattgaatgaagaccctatagaaggagtcacatcctccctacacccttctgactccgttacctgcttctactctacttcaaattagcagttctacacacacagaagaccacaggatttgacaattttgccaaacgaaatgcagagatgataaagccaggggcatcacataaacagatgcaatgtgctgagcaaaaaaaaaaaaaaaaaaaaaagcccatatggcaggaacataataaaagcactcatgacccagaagcggattgggggtgcacattgttctctgtagttgttttggagtggcaaatactcatttgtgccaaaatactgagtaaagggaactgttgacatttgacattaggattaaacaacttcctaaacctgggacacacagtgctgtcctcacctctctcattgccctaagacagtcactgaagtacaagggcctacgtcgtcctcaatgataagagccaataatgagaacagtattattaatatgtattaatagtattattaataacgtattaatactacttacatgtattgtgagtctattttggtacaggcacttgaggtagcttatctcatttattcttcacgatgaacctgtaagaaggtaatataatctaaatatgtggctcaaataattactgtgtaatctggaacatattaacctcttggtaccttggtttttgcatctaaaaatgggattaataataacgtctatctcagtggtctgttttaaggattatatgagacaatatgaatagaaagcacaatggggtcagacacatcatacacatttaataaatactgggcaaaatcgctgctgattttttaagaatctcacagcctagagtgcagtggtgcaatcagggcttactgcaacctggaactcttgggttcaagttatcctccaatctcagcttcctgagtagctgagactacaggtgcacatcaccatgcccaggtaagtttttaaaattgtttttttagagatggggtcttgttatgttggccaggctggtcttgaactcctggcctcaagtgatcctcccacatcagcctgagtcactgagattataagcgtgagcccctcacccagctactgttgaaattactacattttatggatggggaaatcatgcctgacaaggttaaataacttgcccaaagtcagtagagttcagaacagagatcagaacccagggatatccaaggataaatgccacatgggtaagagctgtagttataagccttccattatactgtctgcattaattgactccaaagatcaaatcctggtctaacgtaccatgatgtctcaggaaaagaatgtttcacagcatacagggctctagaaaatctctagcccaaagtaggaaacaaaaaggcacattactaagctcaagacatctatctgttcccactcctcttgtcttcatcaataagaagataaaagaaatccttgcccattttcttattcatttgctctcatacctatagagcccccattggacaaatgccatgaatactgattcttgtactatggggaataaagaggtactcacacacttattgaaagttaggtataaaacccaatgccaagctttgtgccccgagtccacaggcattttgactgcatgagatttgaatgccatcagatgaggtataaacatgaatattttcgtaagtataaaaatggagaagagaaagtactaatttaaaaatcagaaaacttgtgtatattcatctattcaccaaatatttgatggacgcctactgtgggccagccactgttctaggtcctaaggttacaatttcaaacaaaacagacacaggctctgcttttgtgaaacataacagcctagatggggagatgttcttaatcaaatagttgatgatatatttaattatacgggtgataagtgctatgaaaaacagagagatggagctacaagagtacatcacaagtaaagaaagccttcctcaggaagtgttctttaggctgagaagaagttgtacccaggaggatagagtggggagaagagaaccttccccagaaggagagatttgggtgaataagaggagctggaaacaagccagcaggtaggaagagaacagctctggactaccctgctcctccccaccactgtttccttgactggaaagtgggtgtgatggagaacatgacacgctctcagctctcggagtctagcttctctttgctgtgtccaaagtgagggcttactatagagtgagaagattcttgtccagctgcatagaatagaaaacccacttttgttgagagtaaggctcactgaaatgtaggcagcaagtataacttgtgcctaggtcaagagagccatcatctctctcagccatgttcaacagtcaatactgggttccccaaaggctcagatcccagggccccaactccaaaataaatgtcctagagagattttatgactaggcctccacagccctggtttggttgatggcttattaatgatctattctaattctccaatttcctcttaagaaaacaatgaaaatgaaaagttaagatatctaatttttccttatagaaataaataagatgcactttaaaataccattttcacagttttactgctatttatcaggaatcctaaaaacaagagcttctttaacagggtggctgtaactgttggcaattggcctgtatgtgaaattttacttagtttaacaaggccctctactggcaatctgcatgaacaccgtctccaaaggcaaagtttcacattattttaagtgaactgttttaactactctcaataacaaagtatctcacattcctgattctataattcaaggctcaaagaataagtggggagaaaatcaggaaggaaagaaataaatgtcattttgagcattcatttagtggttcataaaataacattacatgaggtatcatttgctttcctctgatgaagctatactacatgtcaaaggtactcagaaaggaaggatatttcttacactgaaatgtattgagtattcatgagactataaaaccaagttatgattgctatttaccaactacaataaaccagatcgtttctatttacccaaatatgagtaactggctgtaatgagaataaaagaaacattggaggcaggcatttaaaattgttgctgatatggcacaactaattattaacttatcctccttggcaactgacaaaaaaagaacatggtgacttgagaatataactactcacagaagatgaatgttttaaaaggagattatatttgacatatatgtcaacgggctgttggagcaactgggaaacttcagctatagggtcttagaaaactaagtaaatattaaaaatgaggcaataactttaggaaaaaatgttaacataaagatgtgatcatagtgatttgactcaacgtaaacaatatttgtaatcaaaacaaaaataagcactatgcatgtaattaaaactgcgatataattatattgaagaatagggatgctctgggaggtacaaaaagatatattataatctaccataataataaagaagtagtactttgacatacacacagaaacatatgatttaggaatattacataaaaacagctgaagaaaaaaaaaactcagaaatggggtagagagggtggcccaagagactgtaagattttatataaatatacacacacatatatatatacacatatagagaaacacatactcaatgtttatatatatgagcatgttagagctattgtttagtactaatattcatatatatacatagatatataaacaatttactattgttggattttctgatttatgagcatgtattactttgactttttaagttgctacaaaaccagttagcactgacaatggaaaccatttgagaaatgccttttgggctggcctggatcagttctatgtttctagattcaatttgccaaatgaagcaagttgcctttatggagcggtttgtcagacatgcgtctcgacagtaacacttgttcccacatttcagaactaacagctcttctttcaacaccgtaatatttatctgccatgttattattcccagtgtatgctccaaaatgggcttgggactctcctctttcctcttgaactcagtccactgggcttctacaatgcatccaaattctcctcaaaggaatcactaatccggtaaagttgatttctaaaaggagagatctggtttcttgccctgaaaataccaagattaatttatgtaactacggggaagtaccctgtgtaattgaggcttccaaactgacacgatacacttcattaggcaagtatgtattggggcattgtaaatgtgtgggtaatgttctatgtatctgagagatttattatttcatctataaaggaaggacaattgggaatccaaaattccaaaggcattaaaccctgtagagttagagaactggagaaaaagaaggctataaggtactttgtgcttaactgggtccatgacttgccagagtgttcagactaaacccttctggctatttaaatccactttcacaaaatgctaccatttccttaggttaccattttcagggaccaaccaaatggccaaacattatttccaattttttctttgtatctaatccctggattacactcttgaccaaactttactaggcctaccaaaacccacaccaagaatgtaaataatcttgatgtttaaccataaacttgggctactctacaaaaagattcaggtctggccgggcgcagtggctcacgcctgtaaccccagcactttgggtgaccgaagtgggcagatcacgaggtcaggctattgagaccatcctggccaacatggtgaaaccctgtctctactaaaaatacaaaaattagctgggtgtggtggcacatgcctgtaatcccagctacttgggaggctgaggcaggagaatagcttgaaccagggagtcagaggttgcagtgagtcgagatcatgccactgcactccagcctggtgacagagaaagactccataaaaaaaaaaaaaaaaaaaaaaaaaaaaaagattcagatctctgagattaaaggaaaaataaaaatagtaaaggactgcgcataggcgttagacactttggaaagactagaaaatgtgaattgccagtttgaatgggtggaagtattaatctgctatactgctctgccagtgcagtcaatcggggcagatgtgaatgaccaaaacgtcattgtgggtgaatgtgaggctcatgaagcctccatatccagaaagcggtaaaatgaaaggttaagagtatgcactgtggggttgagtgcagtgtctcatacctgtaatcccagcactttgggaggctgaggcagatggatcatttgaggtcaggagtttgagaccagcccggctaacatggtgaaaccctatctctactaaaaatacaaaaattatctgggtgtggtggcaggcacctgtaatcacagctaaccaggaggctgaagcaggagaatcacttgaacctgagaggcggaggttgcagtgagtggagatcgtgccattgcactccagcctaggcaacaagagtgaaactccatttcaaaaaaaaaaaaagtacgtgctgtgggttcaaatcctgcctctgcctcttatccacccatgtgacttgtgcacattacttaacctttctgagcatcagtatttttgcttggacaatgaatacaatgatcataataagatagcatgagcacagagcttgaaagtgtgcctggtatacagtaaccactcaatagtgattgatgttggaagaaaacattttaaatctgtttttattgtgcccatcaaccatgtatccatacatttttttcatttattgagaactcattgtgtgccaggtgctgagtttacaaactacacttaagattacaaatttgacaactcaaatttggcaacgactctatctcaaattcactagaatctagtggcagcagcggaaggtaaagaaatacttttaaaatggggctatgcagtgtaagcatcccaacagagtttagatagaataccatggggtgtgactgtttcttcatctgagagaagtaagaggggagacagagcagggaacgttgtcagatgaagccaaggaacgtggaaggatttcagaatgcaggaccgcagtcttctctcttaagtagggagggagacaccacctgagggaggagcacaggcaaagctgggactcaagagtgaagcaaggctcacaggtgccaccgtgggaaaggggtaggcacagggcaggagtcaagtggaaatgaaggcattcagtgagcagtattcatccgtctactcaacaagtaattccctaagggcagtgtcatgcatggtgctaagtttggggagtcagttggcaggtgtgccctcgtgagacacagaggctgaagaggggaacagaagcacagtgaaccaatgcggacggagttccatggtgcacagggacacctacctgcggtgactgggatgtgaaaagctgctcacaggacaggaggtgcatgcaagatatggaggataaactgagtgtgtggagaggtgctgcaggagtacaaaggtgcagatgtgctgaagaacatacaagcccagcatatttcagtaatagagagcagctcctggtagctaggccagtaattcccatcgaaatcatctgaggaactttttaaccatggctggatctgaatcccaccttagaggtcatgattcagtaagtctggggtgggacgtgggcatcagcaagataaataataactgtagctaatactcattagcacttaatgtatgcctagcattgtgcctattgttttagctacattaagatatctaatccttctccatcttcccatgaaggaggcactctcattatccacattttaaagaagagaaattgaaatagaaaagttaagtgaattaaccaggatcataaagccggcaagtggcagaagcaggacttgagcctgggcaggccagttccagagtccaagttttcagtcactgtgctgtgctgcatagtgaagaccctgattagccatcaggcccagaatccccaagacagctctaagtccacactgtggagtagagtgaaatgagccaggaaagacagccaggcatcacatcaagaatatccccgtcttcatggtcagaagtctggcatcaagggccttcaaccacagtgaagaagaatttaaagccaatcagcacagtaatgtggtaattttgccaaccaagtcctgaggcttgggtgtttgcaacaggaaaatggatatttaattcattcatttatttagcataatacattgaataactactctgtgcttagtgctgtagctataagaagtattatatagcaagcagcccttgctttcgacggaaagaggtatttaacaacatggcaaagagctccagatcccagggcaaaaaatggcacaagataccatgacagtcgaaacaagtgaatcaccacttggaccaggagagtccaggaaggccccccgcccctaggtaggaatgtcagggacaaggaaggctccagagagaagggtaatggacgggtgtatgcgatctagctgaatactggaaactgaggtccaggcttcagtgagagaatgaagtgggaaggaggaatcaatgaaaaagtgaagagaaggttccactggagagaggggcccaaaagaggaaaagcaaagcaagctgtggccataagaagaagtctgagacttggaagtaaagcacaaacactgagtatcagagttgggaatcacctcaggtatcccagcctgtacccagtgcaaaatgccttctgaactatttcaactgctgaggctgctccatttgcttttaggccattatctgtaaaataatcacagagttctctttggtttgctagtgaaaacaatgaggaacagacaccttaagaaatgtaacgagagccaaagacaaaacgggaatgttctctctttgccagaccaccttcatctgtacacctgcacatagccctgttcctacaagaaggcataggaaccgcgtgtgggtcccatttctttttcaatatttaagaacttgagaagtgggacacatgctggaatgaacacaggaagctcagtttctagttgtagctttgccaccatcttactgggtgctcttggacaatcacttctcttccttgtgccccaagttttcttctgtgaaaggataaactttgatgaatagtttgaaatctgttttagcagcaagtcccttattttaagcaaagaattgcaaagagcactgagctctaatacacaaaacatatctaagcctaatgtgttctgatggaaaaaaatggagctgacaaagaggcaggatgttacccaccttaggactccctggaaaacagtcaaatattttgaggccttttgacactggcttctcacaattctgagactagagacaaggaaaaggtagtgaaggctgtcaccatgtttctgggctggtgacagagcagctgaattcaggagcaagccaggctcctgagtgagtcatggggttcacatgcggagctaacaggctaacagccacttcttgccaatccgtgcagcgggctgggctgtcaggtctagagggcaggaatcagctgggatttgctactggttgcaagaggctgaactgcaggcactgaggagcagagctggtagcttgaaggacagaaagacaatttttcactgggctcttaagcagaactcccgggtggcaacagagaatagctcacgggccagccggtgcaggtgggataagaggttcctgtccaggctggcggcatacatgaagctcactcttcctatttaaatcccagagaatatctggagagttttaaagagccctgaggcaggcaaaagagaacatgtggattttgtataccgatctagctcagtgtcaaagtttgcctttttcagtagtacattaacttgggttccaactcagaagacaagtcagaacattgaacatttctccagatactcaatgtgaaaagaatccaaatagaaacagtttcaatttcaaaatattttttgatacatacacattcctgaggatgaatgagcctgtgtgtgtgtgtgtgtgtgtgtgtgtgtgtgtgtgtgtgtgtttggggagagagtgtaggtaggaggggacgagagaccataaacatcaacatccacacactagaaatccataaaccacagaaagaatcagagacaaaaagtgggttctccctgcagtgtaccagttcatgaaaaagtagccttcatagttgtctgctaaactttctagatcagcctaatagttttttggttggttgtatctctttaaaaaacaaaaacaaaacaaatgaaaaaccaaacctgacctccctgcagaggcaaatgaggattagccattcagtatctccttatcatctgcatcctggtatttgttctcagagacaaggggtcctctacccctaattccagtccactttagggccctatagttacttagaacaaacgcatacttgctgtgacagccgaaagagcctggagaaatatgtaaacatcatcatctcactttagaaggaaaacaagctgtataaataagaaaaactgttacaagagtttaaaaaaaaaatcccaacagtcttacttgtagttagctcttcagtcaacacatatcacagtcctggagacagacacaggaactacaactctctccagctaaaaatttcctcccgcggttggttatcctctgtttatttttgaagcattcaaaggccacgctaacagaacagactcggttttcctgaacatccacagcggctgggaagtcctgccgtgaatgcggagcaagtttgcggagacttgctccctgggctgcggctccgtagttgcttcgagcttgtaaatacaagctccgtggacaaagtcccaaatgacatcactggcagctgcttattgttgagtctttattaactgactgtcaaaaagaaaggagggggtggggaggaagagtatctcttctgcagcaaaatcggcatcttggagtggattccagttatacatgcgtaaataatcccattgattcacatttttgagaggatggcttctttcaggtctgaaaaagacagagaatcgcctccaccagcttacactggaatagctggagacctggaggaaaagtttgaagtgccagcacagccctaccaaattgtttacccacctgtttcgagtcaacttcagagcctgatgattcatgaatatatgaatactggttgtgtcttacattgcttaattacttttactgtgatatatacacctggccgacatttttcctagatagattgtcttgggtgcaactccttttagatacattctagtgtctcagcttggagtagaaggaagggatccttgaaatcacagcaacattttgtgtgcatttgcaaatatgcaatttttcttttcctgagaagagtgctggaggctttcttctgattcttaaaattttaaccacccacctgcaccacccccgacactccaaaaaacaaataaataagaatctgtgccaagtctttctaataatctcacagaacactgtaaatcccactcacaactatcaaaataaaagtgggccttttctcccctattttccactctctcatggaatctctcttctgtccgttggttcttatagtttttacagttatctcccctccaacccctagcccccacctagagaaattccacagatccaacacctagtctctgccacgaagcgcgaacactccagcccactgttttccttccttcctctggactgctataacgatgcttactatttatatttacttgctgctttttatatactgactagtatttttagtttgttttttagccatctgtgttctgtctccccaactcagtttgaaaggtctttgagggctgccttgtaagtgttatttgtttatacctaaatcacttgccatagtgaatcctaaacagaaatgtgggaggtggggggtgagcattgagggtggaggcaggaacaaggttagctgattctgtggcatggagtgtatgtttagattaagctctctccctggccttggaaaacaatgacctcacatctcactacccccagcagatgctcattgcatgtctgaaaattatttcctcaaagagtagcaattggttattgatttggtagggtcccaagaccccaatatatgctactttcatgtgggaaatagttaaagacaacacaaattgtgtatgtcactgatgggtcttcaatgagccccatgttaagagaaagtaaattagatgtacctaaagattttacaagtacagacccttagacccagcaattccacttttccatagtgatcccacaaatacactcacaaaagagcacaaagatataagcacaagttctttgcagcattatttgtaagccaataaaagggagactaatattcatcaatacaagaaaacaaaaatggaggtaactgtgaatatactgatgtggacagaagtaggttgttgcttactgagtggataaagcaaggtgcagcgtagaaggtggcatattgaacacgaaaaagaactttgcatatgatgagaggaattatataaatgattaacagtggttaccctcgggaaaaaaggtggaaagaactttcacatttgtatgctttgtgtgtggtttgactttttttcaatgatcatgtttcatttttgttattagaaataataataaaaagacttggtggtacattttcaaaataagcctcaaaaagaaaaattgctatttcttcactaaatgtctgacctatagtaggtgctcaagaaagaggtattgattgaatgaatgttgatgaagtttctcccaggatgcaatggtatgtgggagtggaatagggttgagaagaggaagacacaagcactagttttcatttctgatccaaggacccacccctttccccttatatttgaggactgatttaaagacctcttagactctgtccaccttcagaaatgattaaagttcagtgctcagaacataaagtgctgaccttttccttgtgcaatcctgtttgacaaatgaagttttaaggtaagacaagtgtgagccgcttcggttcattttcctggctgctagcaagcaccggagcgacaagtcagaaagcttgtaggggcacaggtgtgaccagctccttgtcatggctagtctaacattaaggaaatctccagggagagcttagaaagctctaacccacaatgagtctgcagagctttattaagaagggactttgccttttttcagtggccgggagtgatggcacaaaacccagccctgcctacctgctatactgcctaccaggcctttatagtagaaactcgaaggcataagccatacattagagcctatgtttttctttaggggggaaaaaaaagtccaagaaaaagaatgactgaaaatttccaccaagataggatagacttttcaaagcactatttctattcctctagagaaagcatatccaattcttgtcttacttcatagtgagaagatatcttacgtctataatcgtttcaagaaaaggaaagcatagcccatgtttcctgcatatttttattttttttatggcccacatattataggaacctgaggccagattctgtttaatgcacttttggagccccttgggtgtgatccaggtcataccttcccgagggagagttaaatacaagtatttagctagacttacgacttagcataaaaacaaaagagggtgggggtaggggagggaaaggccatcctcaccacctctacctactaggtgattatgaatgctgctgccaaaactccccccacctgctgagtgttgtctccccgcctcctgcccgcctgctagtcctgcgctcaggtaatgtcctctctccctgaggcctgggagaaggacggctgggtgacactgtaacaggcacatatatggctatttacctgatcatttttaaaaatgtcttatgctggtcattttattatgttaataagtgttttctgtcttaaattggaaaattcctgaagtcagagatggtaatcagatctgcatggagtaaaaaacagccaaaaggtctcttagagctgcttactggtgatgacatgtattacaagggacctacaaggaccatgatcacaggcacagtttctacctccagcgtctgagtctgccactcccccattctcataaacaactgccccttcttcagcatttctatgtgccattggctttcagtgcatcatctaatttacccttaaaaaagcccagtgaggaggcggaggttgccgtgagccaagatcgcaccattgcattccagcctgggcaacaagagtgaaactccatctcaaaaaaaaaaaaacccagaaccaaaaacaaaacccagtgagttacacactattatcttcactcacctttcacaaccaaggaaactgaggcccagggagatatgttcctgaactaatttgaatgtgattacacaaagagtcagtggcagatccggaatttcaactcaggtctgcctgaccctccagtgtcctaaggagccctggatccctctgaggatgataaacattgaagaggaagttagtaaactaatatgaacagtggtaacttggaataagaagcatgtgaccaccattaatactcctgggtctgattcctatatgcaaatatatgccagtgggcattcagcagagcttcagatgtcaaccgcaaacccatgtgacttctgctcctttatgtaacccagcccctctgcttagctcttccaagagaagataagtcataggcatgaaagacaagtgcaaagaccatgggaatcacactcacagggctgagtcctagggcattactgtgcagtaaattctccatgcccttggaggtgggcaagattcaattgcaggatggagaaaatatcggcggtgggggaattcagtatatttgttgcatgcttccctttgcactgagcctttagtaatgagtattgtctgctgcagtacctgtgtcttctcctggagctaattgttctaccagggcttaagagacagcctgaggccatccagtctgctctgtaagagttaatatggtcaggaataggaagcacaggaaattttagaaagggcagcataggaacacctcagcattcatcaaacaaactggcatggtgttgagagtgtgagtctcaaggggccttgagaaccctcgtgtttagaacgtggcccatgtcattctcacacatatggtcctcagaccatattttaagaggcactggttataacaagagaagcaaacagatgaccttctagtctacaatcagacattgataaagatcatgtagttttgtccaggttctttaggagggagccctgtgaccaattagaaaattcttggtaaccataacttacaatagatcatatctgacacaaagttggtgtacaaagtaaaacttagaaaagacaaaacaggtgccacattgagggccccaaacgcatagtgggataaagacatttataggctttaatcactgcagatgttatggtagccctcttacataaatcaaacaaaaacaagactaaaccataaagtgagcataaggaattccaacaaagttcagattactcccataatgactgctttgatgcatttcatgatatttcaaatttcaaacttacaaatgctgttttccctcctgagaggagtgagggctgcctcctggtcccctcaacacacatgtaatctgtctgtttggttgttgacagtattgcaaccccaaggacctttggcgagggggctgatacagcctacatctgctgggagaggaggtgaggggagagatgtaaagtttcccctattttgagaaactacctggaacctgccatggaaatgaggtgtcagcccaccatccctttgctttttcaccagcgtaggttctaggcccagcccagggaggcacagtgagggttaatgtactaaggcactggaaggctcttcatgaaaggccctatgtaaggataaagtatcatcatgaagttggaggattttatttcagcctcctcattgtgttgttgacagtacatactgtgagattgacatttttaacttctttgcttgccccaaataaaaagtgctgagacagaggaggtgggaaaagggaacgggtgtcgggagccgtaatcttctcctgactttgattttacacaaatccaatgcacaaaattgaagtccagtttgccagctggggtccagcaatactactttaaggatttatgtaaattcattaaactacaagatgcaagttgcattccttttaacctgcgaacagagtctgcctgaaaccagagcctggaggaggcaggggatatgactgtgtggaaactgagagtgcaatgaattttgtgtgccccgattgtctaaatagatagactctgagtccaattttcacctgattctgggaggccattaaaatcagttgataatactaagaaatggaagaggataagaaaaggaagaggatggggacagccactgactttcccctgtgtgaaacctggcttattgtaatcagcgcctgccctgaatggtgttgacagtgggttccctgtagtccctaaaacacactgaggcttgacgcataatagcccctgaccccaccagatcataatagtcccagacgaccacgctaggatgtgatgaggagctcccagcagataacatgcaaagatgccccagggaagaggcagggatgctctgcttttccttggtggccccagggaacagactcttcaggctctggtggccctgctgcatttgcccagatggccagcagagccctgggctgattactcagccagcccctgagttcctcctttcatgttgagaaagctttttagttaaaacgacaaaaatgggagtggtggcaaggaaggtggctcaggggtctgctggagtgggctggagttgcattttcttctttcctttttttttttttttttttggaagcacacacacaagcacatgtgcacacacataatataaattctttgctctgatcacctgatattttaagctccagaaacagcttatttttgtggcaaatatgcttcaagggcccttcagaaaaggcatccttacagatcagaggaagagtgagtcagccctaacccaacagtctgttcctaacccaacaaccctggaaagtcaacagaaatggcagaaattgggtaggggcagccagaggaaagttgccagctcaggtgcaaagaacacctgtccaggcacagggccagggctctaggggtgagcaaggctgagatgcagctgtaggcttttccatgtccagcgtggggactgctcccttgccttggcctgacaaagagagaaaatggtcatcatccaggcagccacagcgcatgtttactctttctcccgggaaaaattgcctgtgctttctccaaactcaggcaaagcccactgtggtttggagaaatggtcatttgtccaagaaaccacagtattagaattctctgcacttcccctgagacgccaggaaagtccaagggacttgaccctgggctattaggcaggagcctcttggctctgttgtcactgctggcttaaactttacaccttaaagaaatccagggtgattgatttgaaacacattgaaccttttccaggtacaataaccattgttcaatctacaaatctactggatttgggaaattattttaaatgacagccttctattaacaaaggagaataaccactcaatttatcagttgccacttattattttgactgattataagaacatgagtcctatcggttagggtcatgagaagttattgctagcttccacattttcaagcattccatattttgaaattgcttaattctacggccagtgccttctgaataaatataaaaatgataacacttcttattttataagaagagtgtagacagtatagtaaggaggcttttgagtgttacaatagcaatagaatacatttgaaatgaagtcttaggttccattcggttccataaacagctcagagggtgatgtccctgggtaacgtcctacagcccatcctaccagccctctcctactgctgctggccaaatcggcagagaaattgcagacagggctggatgaactgaattaaagtacattcttctttccctgtccagctcatcccttattgactcctgagctcttttgacccatagcaaccatctgatctcttaacgataaacatggacttgcatgttcacatttgctttttgtaggccactctcactccaagccagactgtggtcaccttgatgcagagaccttcttctatgcctcagtagttccctccatgctagcatggtgctagccatgtacagctgtgtaaacaggtttattccaactggaaaaggagatgaaagtcacagtaggcctaaaaggtaaggcaaaataggtagatttgacgcaacttgggcttccagctacagacttgaatgggtgatgaggaagtgggaaggcaaggctccagggcctaaggtccagaaacttggctgccattcttttctttgttcttcccattcttttttcttcagctactcctcttccaagccacttgtttaataaagattgtcatatctgcctcctctcctagaggcaatcagcatcacttaatagtggtgaaaaatacatggggtgttcacagaaaataatatattactgtgtaacaaagggcaggtaagcttgaagggtacatgaatctactaatctttgaaatcattaatttgttatttattattgaatgtgcttattcattcactgagtcattcaccaaacattatatggaacagtatacaatttataccacaaatcctcactgcaaacatatagtacttcaggttctatgtatattttgcaatctgaatgcctatagaacattctgtgggtgtctactgattgggagacacaattgaaaaatacattgaaatatttccacctctgttttgataaaaaaataaagtcaaagcataggcgctgtttgtctgagtgagagggggtaactaagattgtacagaactggaaaagttaggacaatctgaaaataaagtgcagctaattgaacatgatacactaatctcttggatacagagaattcagttattagtggaaacccagttcatcaatggaaatgtaattgttgacagagcatgaactatgattgacatgaggtcagaaagtccaaaggtcgcagggttagtgattcatatcagcttgtcagagcctttcctgtaatacactccatacttggaaaccagagtgattggaacatgctctcctttcatctcagagatgagaccagtttccacctaagcctctggtatttggacttgggctggtaaggcaactcatagaaatgcattcccagaagcagggaaccttcccacccccaacatcaaacttccataccaacaccaaattatgtccagtccccaggagagactcatctcaccctaggagggggcagtgggtgatatgcccagggcttcctgctaactttggccccagggactgctgaagaatgcaccacccctgtggtgagagagaaggaagaaaagaaggaaaggacattctagaattgatgtggtgaggttgtgggtagaatgaaggcccagggttgttctgtaatacacatgaatacaaaagtacctggtctggcctggaagacagggactccaggaagacccctatagcattgtaatgtttgggagcattatcacatttagctctggtttgctccctagatatattccctattttaccattatttccctgttctcagcagtttgttctctttttttcttcttttttttaataggatttttaaattattattattatactttaagttttagggtacatgtgcacaacgtgcaggtttgttacattgtacacatgtgccatgttggtgtgctgcacccattaactcgtcatttagcattaggtatatctcctaatgctatccctcccaacttcccccaccccacaacagtccccagtgtgtgatgttccccttcctgttctcttttaattcattgccctcatgttcaatttccttttgatctatatgtatgagcggccaagtatatgtgaagtactgcaggaaccatccagaatgtctctgctccctgtcctcttaaccagatggaaaaacaactgctcttggtttccaaaccctctccccattcattattccatggcttcatttgtgacccttccaggtggcttagaaaaggcttcatagaaaaccacctaagacgacccagctccagcactgaaagtcaagtgtcctttccatctgggcaaagcaaaatggttggtcaccctaagcctactacaatttctattagcaacttctcaaaatctcaaaaataagagaaagaaaatctaaaggaaacaatgtgctcctatactagttgcctaacaccatctaattgcctctaatggtccctcccatgtaaagattctgtgtggtttcctctatatcttgttgactctagttcctatggtaacaaacctctgctccattcatctccatttgtcttgccaccctccctttcttcagcatcttcccttgcacccttgcagtgaccccatctatcccccatctatccctgtaaaagacatttggcaaattgtgcagtctttacaaagtgatgccgtgttgagcctttctgggaaagtacaatctttcagcctggaactaaccctggggaagacgcagacatgcactgcatgggtcccttgtcggggagcaggaagcctc

SEQ ID NO: 398 - DNA, 173535 bp, Homo sapiens
ctcctaaagcactgggattatagacgtgaaccaccacagctaccccgtggttcttaaaaaggggtctccttaaaaaggaagcttcaccttcctttttggtgtgagggagacagaccgtcagggagagggcactttgttcttctaattgcctttctgcagaggttcctgctcaaggaacgggacgcctaaacctcaaatccccagtggcattcaaggctgctcgcaggcacagggcgtgttctggccaatcctgttcgagcaaggggagctgacattggcccagcacaggcaggctgcacagagctgcagcccattcttcctggaagcgcctgcatcagagccaaggacaggccacctagtagcagtgtccctggagcctggtgcttggctcagtacattaaaatgcaacaaccaggccgggtacagcagttcatgcctgtaatcccagcattttgggaggctgaggtgggcggatcacttgaggtcaggagttcgagaccagcctggccaacatggcgaaatcccatctctactaaaaatacaaaaattagctgggcgtggtggcctgtgcctatagtcccagctacttgggaggctgaggcaggagaatcacttgaacctgggaggcagaggttgcagtgagccgagatcgcgccactacactccagcctgggcgacagagcggggctccatctcaaaaaatatatacgtatttcacagatacagtccttcctcgttttggtaattgacagagcataagcagtttttaattttttcaaatttacaattaggctcctgcacggcaactctcttcctgtgaactgaagggaaacttggagtctccctctccacagggttctcgtcttctggaaaagagaagatgggaaaatgcggataagaagagggttagaggggaggaaagaaataaaaaccgagcaatttctagaaaacatgatgattaaaaaaaaaccatccacgcttttggaatggacggattctttaacacctgtggatttccttattctgtgactagcaagctcccaagcccacaggtaggaagcttcagccagtgtgtgtggaaaaaacgccggttttgggatacgacggacaagtcagaagcctgcttgaaccgccgtcacccctttgcagccatccaacaccacgaacagcaaaaacatcaggttctggcaacctgtggggacaaagtgaccatcagcacggggaggtcgctgtcagagccgcgtcacagctcttacgcctcccagaatggtttttggtgtgaggattgctgcatggattgagaaggtggaatttgattggaataactggatcatctcacggatggctgaatcctaaaatgcctacaaagcgtgaaactgactcaggatttcacagaggatggtaaggctctgatttttccacttggcactcatctgggtgttatcattagcactttggtttaatgctgcagggtgaggaggatgtacccagaggccccactgacgcaccccgtccagtggcttctgacatgcagagctgcaggacgggcgtcgctgagctggccggggcaggctgggagctgagctttgcagacactgggtcctggtgaacgacgatgcttcgacatccactcttctgggcattcccagcctgtcctctgctctgtccctgccctcccctaattccaattggtgggattgggtggggctctctgggccccacactggtctgagagcctggcgtgctgctgctgggccagcccaggagcgaatggatgaagttcctctttctgagccgggatcaggcccagaactcccagctcgcagctcgggcagctgcctggtgctgaaaccagaagggacctccgggacttagtggcagcttacagggaatggctaggagtgtctccctctgggccagtgagtagggtccagaccaggaaaagcgtcagaaacggaacacgaggttcaccaagaagccaagggggccggctgagggccagcatcgcacgttgatgctgggaggttgctgctttgcaggagtaagggaaggaagaggccatctcagagcagccgcaacactggagtccacacaggggagctcttggcagagccatccacagcgatgattactgtggacacagatggggaggccctgtgtgtgaggcagtgacagagccattggttgggaacacagccaactcttttggagttttgttaactatcccgaggtagaggctgagggggacacgcctacatgtcatgccacaaacttagcgtactagaacatgctagattttctctcaaagcacgcaggtctgagcctgtcatcattctgccagtataacagacaggtgaatgaagagacgggggaacttggaaatgaggggctgaaaagaagagaaagtggaccctggtactggctgtgtaagaaaagtaaatagtgacccagaagaatttgggtcacggtctgattcatacaataaattcattttgtctcatttgaaatattttaggaaaaaggcatgcttttatccaaaattacgtcaaaaattgcctcaaatgtctctcattaaaaaaaaaaaagtagttggaccaggcgaggtggctcacgcctgtcatcccagcactttgggaggtggaggagagaggaccacctgaggccaggagtttaggactagcctgagcaacatagtgagacctcatctctataaaataaatacataaaacagttgcaccttatcttcttagctcttaattgaattaatgtcctgaaagttcacataaatgacattcttcaatattcaaaaagaagccaaaacaaaacccagtctccaggcatcaggttggatgaggactttagaagtctacggatgtccttcatttaggtttgtttgtttgtttgtttgttttagacggagtcttgctctgttgcccaggctggagtgcagtggcgcgatctcagggctcactgcaacctctgcctcccagaggttccaagcacttttcctgtctcagcctccagagtaactgggattataggcgcatgccaccacgcccagctaatttttttgtatttttagtagagatggggtttcaccatattggccaggctggtctcaaactcctgaccctgtgattcacctgcctcagcctcccaaagtgctgggattacaggggtgagccaccacacctggccaaaatttaggtttttttaaagcttaaaaaaaatgttttggggtcttgctctgttgcctaggctggagtgcagtagtgagatcatagctcactgcagcttcacctcctgcgctcaagcgatcctcccaacgcagcctcccaagtagctgggatcatatgtgtacaccaccgtgcctggctaattttgaaaaatttttcgtagaaaaaatttctacaagattttttgtagaaaaatttgtagaaacgaggtctcactatgttgcccaggtctcaaacttctgggctcaagtgatcttcccgtctcaaccccacaaagtgctgggattacaggaatgagcaactgcacccaggcaaagtcatattttttttcacctgagagctccaattgccacgaaaatctcaaattatattctatgataattcaagttaaatgggcaagtaatatttcttttctttccttctaagtgcctgaaatactagaaatacacaataatggcttttaaaaaactacctaacacaataaaaaattgtgatagaatttattgtgtaatcaacaagttagggaaaactgattttgcattaaaggaacatcttctgtttctgttaaacagcaggaaggacaagacaccagcgcaatgagctttttttttttttttggggggggatggagtctccctctgtctcccaggctggagtgcagtggcatgatcttggctcactgaaacctctgtctcccaggttcaagcgattctcctgcctcagcctcccaagtagctgggattacaggtgcatgccaccacacctggctaatttttttttttttttctagtagaagctggatttcaccatgttggccaggctggactcgaactgctgacctcaagtgatccgcccgccttggcctcccaaagtgctgagactacaggcgtgagccaccgtgcccggccagcaatctgtcttttctatggaggcacaaatgtgcagcaaaccttgcctctcccctatgaccatttggataatttggttactctgtagacaccgagttgaggattttcagagatcaggcttatttgagcaattaaacatttctccattctaagcatacactagataataaatattccacacataatttaagcaatgaatcttatgaaaagagcgacggagggagaagggggaaaatacatttttcctcgtggtcactttctgaactactgtctaagcctgacattaaactcacaccctccccctccatctgggttcttcgttctttccttgaaaaggaggaggaaggaaaagaaaccgtttggctgtaataccgcgctctgtttctggctgttaccagcaaaaacactgtggccaatgatgcccagttagaacctgggctttctaacctgataaacagaaaagccttctgccaacacttcaatggggcatcctgaggccagaggaggctccaggggttttcagctcgttggcagaaaagcatagcataacagcagactatcttccaggtagaggcatatttgcgtatgtgaaaacagaatttactggcggaaaagtcattctcttgaagtcaaagcagtgcctggtgatcttgttgctgaaggtttatctacagtcctagagtcagggagggggagggtgatggcggaatgggggtggaggccacaggcggagtgcagaaccgtggcatcctggggcttgaggaaggcaggtgtgtccttggagaagaataaatgtcctagagacgcagaaccaaagctggagctgggctgagctgagacccgagggttcccacaggccagttctggaggagatagagaaggctagaaagccgtggagaatacgggatgggggtcctgggagggcagggctagggggcggttcaggtgcgtcttggcacaagcatgtctgtgcccccgggcgtcctgagcagagcggggtgtcagggcggggcgcgggcatttcgctcctctctccctgaaccctttcacatccttcccgatcctgttttgcgttatcccaggatcacacgcacaaatccaaacaaacttttctggtcccgttcatctccctctcatcctagagggcacggattttgtttgatgagaaaataaagaaggtcagagggagacaggacacagaaacagcagctctcgggagggcagctggaggccgggctagggctgcctccactgtgccagggctgggggggattggcagagacgtctgggtccccaaccatcggctcttccctcaaagagcagcgggggctctgcgggaggatacactaccctgaaagactctcaccagccaacccaagccagtgtttgttctgcctggctctgggaccctcccgccaggaccccaaacactgccgagggaggaattttaaaaataaaatggatgggccgggcacggtagctcacgcctgtaaccccagcactctggtagcctgaggcgggcagatcacctgagatcaggagttcaagaccagcccagccatggtgaaactccatctctactaaaaatacaaaaaattagccgggtgtggtggtgtgcacctgtaatcccaactactggggaggctgaggcagaagaatcacttgaacctgggaggtggaggttgcagtgagccgagatcgcgccattgcacttccagcctgggcaacaagagtgaaactccgtctcaaaaaaaaaaaaaaaaaaaaagaaaaacaaaaaaagatgatcttatgggcagcagctgccatgagctccttcatcaaggaaccaacacagaagtggtgcagttgttttctctgaatctttctcgtcggttacttttttttttttttttttgagagaatcttgctctgtcgcccaggctggagtgcagtggtgcaatcctggctcactgcaacctctgcctcctgggttcaagcgattctcgtgccttagcctccaagtagctgagaccacaggcacccaccactacgcctggctgatttgatttttgtatttttagtagagacagggtttcaccatgttggccaggctagtcttgactcctgacctcaggtgatcctcccgcctcggcctcccaaagtgctgggaccacaggcgggagccaccatgccctgcctcggttgctttttattcagaggttgaactctccataaagccatggacaaaaaaatcatcttgcatgcgttagggttgacgttaacagccctatttaaaaatgttggccaggcacggtggctcacatctgtaatcccagcactttgggaggctgaggtggatggatcacttgagcccaggaatttgagaccagcctgagcaacatggtgaaaccccatctccacaaaaaatacaaaaaccagcagggcgtagtggcacgcacttgtagtccttgctacttaggaggcagagacaggaggatggcttgaggccagggaggttgaggttgcagtgagctgtgattgagccactgcattccagcttggatgacagagtgagactcttatctcaaaaaaaaaaaaaaaaaaaatgtccgtacttgattcctcatatctggaaagtcccttcagtttataagtggaattcacagtggtaaagccactgggacaagcacagcttctaatcacagctgtttctcaaatgctctcatgtattgcagaaaatttaacaacctaggtaaattaaaaaacctaagtaaagggagtttagggcattatatggcacacagtagtcgcttgacaaatactggctggatgttacttatctgttggaaataattcaactaacatatttgtgtactgaaacgttttttaagcagctcttcaaatatatttagataactcacacattaaattctaaaatataattttgattaaaaatgcatgtatcaacgctgggcacagtggctcatggctgtaatcctagcactctgtgaggccaaggcaggtggatcacctgaagtcaggagttcgagaccagcctggccaacatggtgaaaccctatctctattaaaaatccaaaatttagctaggcgtggtggcgcatgcctgtaatcccagctactcaggaggctgaggcaggagaattgtttgaacccaggaggtggaggttgtggtgagctgagatcgtgccactgcactctagcctgggcaacagagtgagactctgtctcaaaaaaaataaataaataaaataaaaacgcatgtaacaatgagtagcattaacatgccaaatcaggtttccagcggagagtccagaaacgctaggaaacctcatctgcagagagttggaatgaaaagtcatctctcctctggttaccgtggatcaggggcactctatttgcattcgtggactcctgaaattatatataaaatcaaaagatttggccgggcacggtggctcacttctgtaatcccagcacttagggaggctgaggcaagtggatcacctgaggtctggagtttgagaccagcctggccaacgtggtgaaactctgtctctactaaaaatacaaaagttagccaggcatggtggcacgagcacctgtaatcccagctactcaggtaactgaggcagaagaatcacttgaacctgggaggcggaggttgcagtgagctgagatcgcaccactgcactccagcctgggcgagagagccagactctgtctcaaaaaaaccaagcaacgaaacaacaacaacaaaaaatcaaaagttgtttttatgtgcattttttctggacaaagtaaccataaccttcatcaaactatcaaagcctttgcgagccaaacctgtccccaccccggaaaaaaaacaatgaagaatccccgctgttgactgagactctaacaggcacgcggattacttaactcacatctccttcagactttcagggccagcagggatacgagaattccctaagcttaaattactctaatattcattaacaactctttagagtcatgatatttaaaaaaacaatttttaaaaaggaactgtataaaaatagacacttgggaagattttaaatgtacatgtccattgcgtgcaagtgtgtactttttcttaatcgcttcctcttggctttctccggttagtttcactttcccagtacgcgggatctattccaggtggccacagccatagattcccacagtgggggaaaagcaaccatgtgaacaagatttcagatgaaagagaaaccacaaatgatcagttctggggctgattgcaaaaattagaggctgcctttcttggctgtttgagaaatcctctaagtcactgggtgccctttctagtagaaagacccacgttctggctgggcgcggtggctcatgcctgtaatcccagcactttgggaggctgaggaggacggatcacttgaacccaggagttcgagaacagcctggccaacatggcaagaccccgtctctgcaaaaaaatacaaaaattagctgggcatggtgttgcgcacctgtagtcccagctactcaggaggctgaggtgggaggatcacctgagtcagggcaggtcaaggctgcagtgagccctgatggtcactgcactccagcctgggtgacaaaatgagaccctgtctccaaaaaaaaaaaaaccgaacaaaacctccattcttacaagaccctcaaggcagcaaggacgggttattccctaagctggaaaggtgaccagggaggcctgcagtggcgactcgggaggagagtgacctcatcaaacagcaacctcattggccccgggctccagcagagaatcagctggaggctgcacccccgcaagtccatgagcaaccaccagaagccatgaattcagctccctttgtggagtctacaaaagaatctttgtgccctgaagttggtcataaatacttaacttaccaggccgggcacagtggctcatgcctgtaatcccagcacttcgggaggctgaggcgcacggatcacttgaggccaggagttcgagaccagtctggccaacatggtgaaaccctgtctctactaaaaatatgaaaattacccgggtgtggtggtatatgcctgtaatcccagctgctagggaggctgaggcacgagaattgattgaacccaggaggcagaggttgcagtgagctgagatcgcaccacggcactccagcctgggtgacagagtgagactctgtctaaataaataaaaattaaaaaaaaaataactcatcaggaaaacccctacaggggaaggggctctaacccctggaagatccatagtttggcctcagatgcgggagtgtggtgaactcccaagaagtgtagaaaatggcatgtgtgtttttctgggaagaggctctatgactttaaacagattctgaaggggctttgtgacttcctcaaaacacctgggaccccagtgatctgtgtacctgcaatcactctttccttttcagaaaacctactttttccccctcaattccttctctaaggatgttgcagaaaactatttaggaggcctgacagggaaaatctcacaagcaaaacttgtcctgcaaccttacttttattgtttaaaaaattctgtgtaaaaataaatacttttcaactcaagttaactggagcaaatagatccaattaaaaaaataacataaacacaaacagggttttctacttgccctgtttctgaagtcatgacgtgaaagaaaggcaaacccacccaggtgagccacagatcgcagaaaacacgagctgtccaaggaagaccgccctcctctctgaagcagtgctcatcttttcaataagaaaacaccaggcatcatatatttaaattttagaatattttaatgtccatttcttcagtgaatgcattttgaaattattagaattaacaatttaaaaagagcagataaaaggatatatggaaaatgcaaacagtcggttcttgctaattcaatttcagattctaggcatgatgtgattttccaaacaaccaattaaaaaaaactccttacctcgaaaatctagaaattcaaatgcagacgtgtctttggaaactacaaatgattacagcccatgtgacaggaagcacgcggccttcggctctccggatcgtgtgcaaatgtgcagggggagcccccgcgggtgacgtcagtgtggatgaagtcacgggtgtggcagagcctgtggggctctcaagctattcgagggttttgtaactgatgctctacatttgtttgcattggataaaattgtgtgtgcttgtttaccatatatatatatatatatatatatatatatatatatatatatatatggatatataattcgatctgagctgggactgagaagaaaatagcaattgcaactcaaagcaactatttacacacattcaatgctgaagtattgcttcctgccctaagttcctaagaggtattgccaccctgaagcacgacccatgccgtcagcagccctcgtgccagctgcttagaaactcgtgtctccagcacgatgtgctcgctgccaacagacaagagatgcacggcgtttccgctgcagagattctgtggttctgcactgaggtatgcatcggagcaggggacggggaggacccgaggggcttcgtggcccagagagaacgtctgcactggctgtttaggaaggctcagggtgtttgaaagacaacgttaagctctgggtgagtctgcacggggctgaaccagactccactttgcagctccttggtttcccggggtgaggaatcacaaacacctttgtggttggggaaggaaatgggcttgatggggaagaagtgtgtgcggagaactttgcggagcatgttctgagcgagacagcaaggtcgtgagcaaacgcccagcccctcaaagctacacagcctggaggggaaaggggaggggaggacattcaaatatacaccttaatactgatgcagaaagagcttcatgtgaccacaatccccacgaacaaggaaagcatcaggtagtgttttttaaggaaaaaaaaaaatctgcggtgttttataatacattctttagaagcaagaggtattgtcacaaccaccctttcttcggtattggaagaccagcaaactgacagtcacacctgacaggaaaccttacagctaatggggggaggtgccctggactctcaggacgccgggaccctggctctggctgtcctgatgggtggccatcccaggcaccgcccctggagaggtggcgggtcagaattgtgacttcttcatgccggggagggcaatctgtatgtctctggggaggagtagtgatgatggggactgatgcggtgtgaaaacgagacagtgagatttgacagcggaaagcaaaatgcacagggacaacgggcaagactgacaaggagtgcaccctgggcctcatcagcgtcccggggtcccctgaaagactggctacaactccgaccggacaactcgggcgagctcacttccacacaaacttcagactcaatatggcaaaacataatcagacaggaccagcagccaactgcccggacggagctcccccacaccaccctcgggattccgcccctaacaaaccccgcgtttgcatccagatgcctctgtccctagatacggtgtgagaactccatttcagagctggaatttgctccccagattaaatcctgccactgataggccctgtgccatctgagagcgggaggcagccaagaaacttctggaatttgtggaagccaagatggcaccggtgctgccggcacagacccccgtggttctgagctggaccccggcagggaggagcccccgtgggtggcaggggcagctggtgggcttctcctattcccctagcctcagaattgcactggccatgctttgaggtcccactcagacccctcttggggtggggaggttgggggcggccccaggtggccaaaacacaaaagagacatctggttaccttcctgggaactgccctcccctgtggctatgaccccccaccctgaggacccagcacccctcccgggagcgcacatgcttccgggtaaataaataaataaataaatgcaacctcggatgtttatttggtatttccctctccgatgagtcagcttccaggaccaacacctccactcccgatggggagacccctgggtggagggtcgggggtgagaggcggctctgagacccccgaggcctgggcacacgggcgtcgtgcccggctggcatttgctgtcttggcctgcatgcatgtgggcgagcccctaaacccgctcagtgcagggagcgcggctcacccacagcccacggggcgcggtgctcgggaaagtgcgggtgggcaatggggggtggcggagctgtcgtgacatgcccccttcgcaccccctcttggcggattactggcactttatatcagattcatgaatgcaagtgtgtgtgcgcatgtgtgcttacatagagaggtcgggtcgtagaggaacactgtgacatagacagaaacaaaataaactcaaaaacagggtattagccagagaaccgaaaatagtgtctcgtgggacgtgggaaaaagcaataaaaatgagatcttaaccacagcttttgttctaaaagtcaaataatacccaaagccatgatctccactggcggcctctgtcccgagactcgaggccgaggccagccctgaaggcacttgttctccaccacgtgctgaacggatgacccagaggcagcggggtttccagggaagggagcgaaagggaagaatggatgaaaatgaaccctgaataactgtgatccacacagaagttagggctgaaatgaccacataacaccacgtccggggagggcaactgtggcgcttggaaagcacaacagccaaatacaaatattactgtgtttcgacaaacagagcacctcgggcagcgggtgggcgccgcctcacacactctttgaaacgttgagcttggtgagttcgttggcttcttctattcctgtttcgtcacagtcgtctttctctatggctttgccaaatcgacccctttcttcggctttgacgggctccttccacggtctcttgggggacaggtgggcatccttggcctgcgtgctgctgtcagaacccagagatgtcttgtccacatactggacagaaggcaccaggttggcaatctcgtctgtgggagaccgtccgatgctgccatccacctggacgcggatgtctggggagatggacagctggtgctgtgggatgaccctgtgatccgtgcactttgggtacaggtaggtcttcatctggcctttccccttgacattcacggtccctctgtagtcgaagtcatagcccatcttgctcaagacgcggtagctctcttcgctcacctggatgcggcactccacgccggtggtgtccatcctgctggcgatgttgacggtgtctccccagatgtcgtacagcagcttggtggtgccgatgaccccggccgtgaggggcccatggttgaagccgacgcggagcttgaagttgaaccacagcatgttgttgttgaagtcgtccaccacgcgcatcatctccttggcgaactcgaacaggatctgcaggtgctcctgcgggtggctgccgtcctgggcctgcgcggtgttcagccctgacgccgccatgtacgtggctccgatggtcttgatcttctcgatgctgctgtagtccggcttgcttaggagctcgtcaaagtccccgatgagctcgttgaggacccggtagcactccttgccgccctcgtagttctcctcgtagaactcgctgaagttgacgatgctggcgaagatcacccctccgctgtcatggttcttggagtaggtctgggacaccttcagctgctcagccacgtggtaggggatgatgttcctcagcagccagtctgcctggtcccgcatgctctggatcttggtgcggtgaagatccgcttccacgtctccgtggtagtggaggcggtagctgacttcaaattcgcgattcaggaaccagaccaacaagagcaggagaaagaagacgagaaccacctcctggccgatgaggctggcgggccgccggaggtcacgcggcaccgaactattgcacgggttcctctcggaactggagagcaaagacacgggaaagggagaggttactgctcggcgcttccaagctcagaacagccccgctagctacgcaaagctttgttgagtccaggccttcaacaacctgaagctgtcaagctgcccattcctggtttgggctggctgaaggtatggagggataaagactaacttttgaaactgattgatttcattttgttaaatagaggtggggtctcactgtgttgcccaggctggtcttgcactcctgggctcaagcaattttcctgccttggcctcccaaagtgctggaattacaggcgtgagctgctgtgcccagccctgtaactaacatctttagtaagtgcttggtaatcgtttttcttttctttttctttttctttttttttagaagtctttagcttctttcaaaaatcttttcttttctctctctcctttgtttttttagagacatggttgttgtccaggctggagtgcaatggcacaatcatggctcactgcagccttaaactcctgggctcaaacgatcctcctgcccagcctcctaagtagctgggattacacgcatgtaccaccacacctagctaattaaaaaattttttttttgaagagacagggtcttgctggttgccaaggctggtcttaaactcgtaacttcaagccatcctcccaccttggccttccaaagtgctgggattacaggcttgaactgtgcttggcctaacatctttttttttttttttttttaagattgagtcttgctctgttgcccaggctagagtgcagtggtgcgatcttggctcactgcaccctctgcttcctgagttcaagtgatcctcctgcctcagcctcctgaatagctgggactataggtgtgtgccaccatgcctggctaatttttgtatttttagtagagacagggtttcatcatgttggccaggctggtctcaaactcctgatctcaaagtgatcagcttgccttaaagtgctgggattacaggtgtgagccactgcacccggctttttgctgaatgaactttttgaaagtaagttgctgacatggcacttcagctctaaatatttcagcatgtatctcctaagaataaggatatttccctatgtaactacaatatcatcatcatacccaagaaatttaacattctctgatatatttggttcttagatttctttttttttgagacggagttttgctcttgttgctggtgagatcttggctcactacaacctccgcctcccgggttcaagtgattctcctgcctcagcctccccagtagctgggttcacagacatgtgccaccacacccagctaattttgtatttttagtagagacggggtttctccatgttggtcaggcttgtctcaaactcccgacctcaggtgatccgcccacctcagcctcccaaagtgctgggattacaggtgtgagccaccgcgcctggccttggttcttagatttctaatccaataaacttatcattttacaaatagcttttatgagttctatactctctacctgtataaaaaagtttgacaagacgccatctcccctgattctgggttagttctttttgccgaaatcactcaggacaatgctaacatctgaaccagtgccattattttctcatggctgtgcagtgttccagcactcggaaattctgtaatttagccagattccccctgatggaactgggcccgagtctgtcttttcttaccacaaacagtgtcacagggaatattcccctacccctatctttgtgcgtatggaagtgctgagtcattttaaatattgcacatttagaatttccttagaaatttccaaattgcccttctaaacaaggctgaaccagtttctgcttttttttttcttttttttgagaaggagtctcgctttgttgcccaggttaaagtgcagtggcgtgatctcgcctcaccacaaactccgcctcctgggttcaagcaattctcctgcttcagccttctgtgtagctcggactacaggtgcacgccaccatgcccagattatttttgtacttttactagagacaggttggtctcaaactcgtgacctcgtgatccacccgcctcggcctcccaaagtgctgggatcacaggcgtgagccaccgcgcccagtctctgctccctttgataactgagcctgctttcagcggggctgtctccacttcagtggcactgatggagacagccatggtcagggggctgcagatgagtggtgagtagcacaatttctttttttctttttcttttttcttttttgagacagagtctcactctctagcccgggctggcatgcagtggtgtgatctcagctcactgcaacctccacctcctgggctcaacgattcttgcggcccagcctcctgagtagtgtgcgccaccaggcccagctaatttttgtattttttttttggtagaaacggggtttcaccatgttggctgggctggtctcaaactcctgacctaaagtgatctgcccgcctcgacctcccaaagtgctgggattacaggtgtgagccaccacacctggctgagtagcacaatttcttaaagtttgtttgaaatatatatatatatatatatatatatatatatatatatatgtatttttttttttttttaagaagagacagggtctgtctctgtcatccaagctggactgcagtggtgcgatcctagctcactgcagctttgacctcccaggctaaagcgatcctcccgcctcagcctccagattagctgggactacaggcacacaccaccacacctggctaattttttgaactttttgtagagatgaggtcttactatgttgcccaggctggtctcaaactcctgggttcaaactgttctgcttctgcctccccagtgtgctggaatacattttttcccatttaaaaatactacatactcatcatagaaaatgtagaaaaaaatagacaaaaaagatttgtccatcgtcctgccatccagaggcaatcactattaacatttgttgaactgcattctagtctttttcttttttacaacaccgtgactgttctgttcatgtaaatgctgtaccctgatgcattcctcccgcgcacagagtaggccagttgatttgatgcaataatgggcttggtcactatatacttatatatgcgactggcggatccacagtttagacagctccatcacactggaaagctcaattctttttcttttagagacagggtctcgccatcttgcccaggctggtcttgaactcctgagctcaaccaatctgcctgccttagcctccccaagtgctgggattacagggatgagccaccacgcctggccaaaactcaattcttcttttttctttcttgctctgttgccctggctggagtgcaatggcgcgaccttggctcactgcaacctccgcttccaggttcaagtgattctcttgcctcagcctcccgagtagctgggactacaggtgtgcgccaccatacttggctaatttttgtattttttagtagagacagggtttcaccatgttgaccaggttggtctggaactcctgacctcaggtgatccacccgccttggcctcccaaagtgctgggattacaggcacgagccaccatgcccggccaaaagctcagtcctttaatcaaagtgtctaataagtttcactaactgttcttgggatattaaaaaacaatgagcttgacctgtgtggccatcacggccctctgcgaagcacaaccgccaaaagccctggccgtgggtggaacagaacccctgggccccatcctggctggaccgcgggggagtttcagaatcttgggtaagccatgccatctttctgggtctcagtttcctcgcttgtaagctgtgaagatggactggagcatggctacgtcccttccagcctaaggttccgtgcaggaaaggcctgaggctgccatccttggaaagacctgcctgcaaaggtggtggctggcaccagggagctgggatttggggagggttcctgccattccttgataagagcggctcacactgcctacactgtctaaataaggaggtttacgctgaatacccgctttcctgctggaagtctggaatttaggcacgtgctgggcagaggcgggagacctgaacagcccctaatacaagcctggacaccgagactttaatgagcttccctggtaggcagcatgttacaagtgttgtcaccactcactgctggaggaattaagcccatcccgtgtgactctaccgggagaggactcttggaagctggtgccggcttcctccaaacgtcaactcacacacccttccctttgctgattctgccttatgtcttttcgctgtaatcacagcggtgagagagcagattgcggagtcctgagtccacctggggctggtcttgggagccctgatacgggctttgtgactcaacgcctatgaccaggaaccaagagtcctcagtgggaagacaccctgtgcttcactgactcatttcgtgaactgctattgaaacagatgacattacatatcctacatctcaagtactaagcaaaataaccatttgttacgatgatgactcaaacatatttctgtccagctccatgagccctctggttgattgtaaatagagcaggaagagaatatggactgggggaaggttttgtgagccccgctcgttgggttaggagttgacctttcttttggtttctcaaagtggtgacaccaagaacagtcccctttaggagcaggtgtcaccaaggtctaacatccccattatgtgcagggggtgtttccagtctctgtggtggaaatgggagactgtatctgggcttctcaatcagttatcgcttgtacagctcactctaatctgcgggagccggagccagcagcacagctgactcgagacgggcgcaggccaggcccctccaggcagaggagggacagcagcacatgggctagtgccagagggagaggaaggcagagcacagcgtttgctttccacctttgcttccaaggaagaaaagccatcacacacagcatgtgcactcagaaaccaagggggctgcctcgcaacagaaggcatctgtaagaaacaggtacgaggacagcttcccagctagaatgtgtgtttcctattttaataccaaaggaacaaaggagccgatcctattcctaaattcaaatagcaaagatccacttcaaaaagaagaatttctttttcttttctttttttttttttgagatggagtcttgctctgtcccccaggctggagtgcagtggtgcgatctaggctcactgcaacctctgcctcccgggttctagcaattctcctgcctcagcctcccgagtagctgggattacaggtgcccgccaccacgtccagctaatttttgtatttttagtagagatggggtttcacaaacatgttggtcaggctggtctcgaactcctgacctcaggtgatccacctgcctcagcctcccaaagtgttgggattacaggcgtgagccaccacacctggctcaaaaagaggcatttcatgtgactaaatgcaggagttaatttataagtcataaatggaagttagagtaaaatacagtgtaatccgttatcatggagaagagggattgaaaaactgaaaaaaatagaaagcaaacatcacttgcagtcctaaccagccaaacgtggcttcggttgacactttggtatatttcagtgccatttaaaatctgcccctagggaggtggtcaggtcgggggagagggggtcagcagcggtggggttggagggcttctggggtagtggtaatgctctacttcttggtctgggtggtagttaaatgggtgtgttctctggtgaaaatgcactgagctgtccttttatgatcaggtactcttctgtgcatactgacatacacatcaataaaaggttaaaaaaagatgctaggtgctttacttttaagtactaaagctgtaatcatcactcattcattatatcctaagtataaatcttgtacatatttttactatatataaatacctagttgtacctatagtacatatatagtttcacctagtaaatgaaaatcttaaatgttttccatatttactgcattttaacagttgtattatttgagtaaatgtataatcagttaatttatttattattgacaactacagttgctaatgaatcttttttttattttattttattttttgagacagagtctcactctgtcgcccaggctggagtgcagtggccgatcttggctcactgcaacctccgcttcccaggttcaagcaattctcctgcctcagcctcccaagtggctaggattacaggtgcccaccaccaccccagctaatttttgtatttttagtagagacggggttttgccatgttggccaggctggtcttgaactcctgatctcaggtgatccacctgccttggcctcccaaagtgctggaattacaggcatgagccaacgtgcctggccttttttttctgagacagagtcttgctgtgacaaccaggctggggtgcaaggacaccatcacagctcaatgcagcctcaaattcccggcctcaagcccaccttagcttcccgagtagctgggactacaggtgcataccaccatacctggctaatttttacaattttttgccaaaacaggatttcgctatgttgcccaggctggtctagaactccaggcctcaagtaatcttcctgccttggcctcccaaagtgctgggattacaggcgggagtcaccgagcccggtccttttctgtgtgctttgattttctctcccttcctctcaaatctgtccatcttttcgttgtggttctatttattatttgtaagcctggaaagttatctcagttttagaggcttgaaaactattgaattttactttttctagattttatatagtttaatttttatttccgactcttcaatttatttagaatttattctgctgtttatagtaaagcaagggtcaaacatttagtattttggatttcaagtcagttattttattactttttgagacacagtctcattctgtcacccaggctggagtgcagtggcacaatcttggctcactgcaagctccgcctcccgggttcacgccattctcccgcctcagcctcctgagtagctgggactacaggcgcccgccaccatgcccagctaattttttgtattttgtttagtagagacggggtttcaccgtgttagccaggatggtctccatctcctgacctcgtgatccgcccgcctcggcctcccaaaatgctgggattacaggcgtgagccaccgtgcctggctgatttcaagtcggttattttaaaatattttacaaaataacttttttctttgatttgcgagatttcctttgttgcatgcgaaagtcttacataaaattacatgactgtaatgtcttattaaaataataaaactaattttattttccccattagacattataactatgatacagttcaacgaggagatattttccactttctattctaagaatgcacgtattgttccttttattcaagatcccattgttttcaggaagcttcgaaatgggcagggtaatacagtcactctcgtttattcagacagaagtgcaatattaaaagcttacctgaaattctgtactgcgtcaaggggcgaagttaatacagaactgaaattaaaatgcagaaaaatattatcataaagagcaaagaaggcattccacaaggcaacctgagaagagcttgaacaaactatgttccttttttagacgtggttgtacatccacataaagccacctgctcccacctctttcttcacatctgtgtctcccaatgctgggggcagttcccttggtaaagctgagtttacgtctttgtttaccatcccgcatcctctctatcctgctgaggcttagcaaccgtgatgggattaggggctctgaggcctcaagtggatggaggagttctgggccgagtggaacttcaaccatcatccctaccccagatctgctatttgaactctgggcacaaaggcggcagaggggtcccccatcactgtggctctccagctccaggtagaaaagccccgcagccatgactaaaggccacggtgaatgcccgatgagggacctgtgatggatttaaaaggtaaaaagcagtttgctggatttcatactctcgagaaagagctcatcgtgaccatcgttctagatggccataccttcagaaaaatccaagtctgctttattttgcttaatctattcattaaagtttcctttcaagtactgaatgacagtcctattttaaattccctttttgatcttaatttgcagggaatttaaatgtcttttgtattgtgattcttttcttaagtaaactgaggacggatgctcacactgcccatggctggactgttgctttgctaataaccaaagacaccccgtgcctactccgtctgatactgacaatactgcggcaaatagaatcattttgtgcttttgaatgaattcaagcagaggtccttggcaacagcaatgccactccaacggggcatttcggaaatgccaggggtccctctggttctcttaataactcagggagccagaatgttagatctcctgcaaggacaaggaagaaatgtcccatgtgactttaaaacattctgcgcacctaaaccctctgtaattgtaaacaggcggttcttcaatacacactaatagtgaaacatttttataagcagttataggaaaagcccaatatttgggagaaatttattacatgaatggaagcttaatgggtttaagatatcacgaaatatttgaataaattgttcactgcttacattctgttatacaaggtattactgtatttccaacaacacatttagttgaaaaggcttaaaataccctgaaaccagtagcaaatgtgtaataggcaattttgagacttattttttatttttatttttggagactgagtcttgctctgtcacccaggctggagtgcagtggcgcgatctcggttcactgcaacctccgcctcccagggtcaaccaattctcctgcctcagcctcctgagtagctgggactacaggtgcacaccgccatgcctggctaattttttgtatttttagtagagacagggtttcaccgtgttgcccaggctgtcttgaactcctgagctcagacaatccacccgcttcagcctcccaaaagtggtaggattacaggcgtgagcaccaagaccggctgggacttatttttaacaaatcaagaattattcagttagtgcaacacatgaaagatagggatcttactggatgtcgctaatggcaaatattttaaatatagcacctatcactgccatcctgtaagtttttacattttttgtagtacaatgatgagaactgggcttgtccccagaggtctaccggcctccctgactcctgtttctgtgtctgcgccatcccattcctcagcacctaccagtgatacggttctgaaggccagcgtcctcctcagtatgcagaggatttcaaaataaaagacctatgttcagtgactggtcattaatcctacgtctcatgacatcatatggggaactgttttgacctatttattattttttgtttttgagatggaatctcactcttgtcacccaggctggagtgcaatggcacaatctcagctcactgcaacctccgcctcccgggtacaagcggttctcctacctcagcctcccaagtagctgcgattacaggtgcacgcccccatgcctgactaatttttgtatttttcgtagagacggggtttcaccatgttggccaggctggtcttgaactcctgacctcaggtgatctgcctgccttggcctcccaaagtgctgggattacaggcatgagccactgtgcccagcctgacataatattttgaaataagccccaggtgacttgcaagatcatcctacgtcttcacctcctccttccaggctgtgacctgtcccggttcatgaaccctaccccactcaaggaaagtcagcaccagcttcctctccaccttcacatccatctgcagctccgctctttcatggccttgaccatcttctatgaaatccttcaggtcctactttcttagattccagcccattcatcagaagtcacctcggtataatgcaatggcagcattatgttttccaggatgtctacattcaactacccagagtgctgttctaaatgatattctttttctttcttttgcatattactctgagggcatctcattagctctttggtatgatgtgtgctgacagctattttgggtcatgatgggaaatatctctatcggggcgtgagaagcaatgtgcaaatgcagccaggccctacgcaacctcgggcaaggtggccacgcaccctggtgcccgcaagcagtgctggccgcgtacctgtctgggcacagggagacgtagagcaggagcagcggcccggcccccacgacggtggcgagggaggacctcatccaggagctgagctggcagaagttacagtagtgcacgacggcaatcagcgcggccgagcctgtgaacactgggaactgcaagaggcgaagggttaggacagccgcccagggccaccccgccacccctgctatacccggccgccaaaacattcgccactaatccatgtttccttttttttttgactgagtctcactctgtcgcccaggctggagtgcagtggtgcaatctcagctcactgcaacctctgccttccgggttcaagtgattctcctacctcagcctcatgagtagctgggatgacaggctcccggcaccacacctcgctaatttttgtatttttagtaaagactgggtttcaccatgttggccaggctggtctcgaactcctgacctcaggtgatccacctgcctcggcctctcaaagtgcctgggattacaggtatgagccaccgctcccggcctaatccatgtttctgtgtaacctaaaaatatcaccgataccagctaattgctcactatctgcagtcagtcttacttttgctagtgggcagtgtcaaggacagatcaagcctctaggttccctacccggcgtgaggctccctgttcacatggcatcacactcttctgcaggtgtgggaaatggcacgtgtcttcgtggaaaggaaagggaggcctccctgtttgagaaacgctgtgtgatcagtttccttcaaaacacttttccttggggcccagtgagatgtgatttggggctaaagtgtcaaacaccatcagcccgcccggaagctcatgctcacttgcaccagaaggatcatctcccacggccgtgctggttccctctccacggagtttagcacagttcccttcctgatcagcagcagccgacccgggcacaagtcaattctgtgtgccaggtatgcttctcgcatggttaggaaaggtgggacagacgcttctttgtaaaatgtgaaggaaaataactgatttggaacttgatgaagaagaagccacactggcagggactcgtgcccaccggggactccccagcccggccactgcccgggcgtgagcatctgggcaggccaatgctaagtcggcttctaaaaaagctggctcaggagagtaaaagagttcgtgcctcttcaagggtttattttattttatttattttattttattttgtgacgcagtctcgctccatcacccaggctgcagtgtggtggtgcaacctcagctcactgcaacctctgcctcccaggttcaagcgattctcctgcctcagcctcccaagtagctgggattaaaggcgcctgccaccatgaccagctaattgtatttttagtagagacggggtttcaccatgttggccaggatggtctcgatctcttgaccttgtgatctgcccacctccacctcccacagtgctgggattacaggcgtgagccaccatgcctggccaaagggtttatttttaaattgctatcccaagtgatttaaagaaaagagagattagggagtccaggagagcgtggaaataaaacggctgagcctttacttacgtgtatgttggtctcatattcggaggtgacatgggagtagacggccagtgcgggaagcgacaccaggatggccccgatgcagtgacgtggtagccagccggcgatccactccagcaggcgcttggtgcaggccatgacgtcctccaggaagaacaccatcctgcgagaggcatgggggttagcaggagcgacggggcccggggtgggtcatcggccaggagacaggtgcgaggccgcagccagcgccgccctctgctctctcccgtgttgcccctgggatgggcgtgagagcaggcgtggggtgggagtctacctccctcacttttggtagaaggcaaggaagccaggcttagctcattgtacctgattctagggtcacatgttgcgttgtgataaaatatgcttgtgaaaagcacatgcttcgctcgcctaacagaacacgtgagagtatcacaggccctgaggagagtctcctgggggccaccacgttgccgtcaccggctcccatcagcttctgaggcaggaggtcttgacgggggcagctttggaggcgtcctggaattctgtggagcccgtgcagttgtcgcagcagaagaggcggtcctggcatctggtgggcaggcgccagggacagagctgtcctgcatgtgggcaggtgccacccagggaggttctgccctgcaccccacacagcagccaagcccctgggcacctgcaaaggcagaaggctgctgacagcatcttagcccagaggctgtgtcccagctacaaacagggtgctctgtggtggtgctgacacaccctggattttcttggagcgcagctcctgtggaaactgagtgacagtggtctctgctgtttggggcatcatcatcagtgtttcagaaaatcacaccacaggctgaacctggctcgtggcgcttagaccaccaaacccgcacacgcgtgccgtctgcatctgggctgtcatgttcatcgtgcatgttcacctctagctggcggcttcaggactctccagacagcggggctctgttgtacgtgaggtccagcaccacgtatttcattttaaaagactttgtccttctaagcagagcgactgtattcactgactccttttgcaggcgtgtgtctagcgggcttcgtttcaggagtgtgatgttgacacaataaaagtttctgtataaagaagcagctgagtgtgcgggccaagaaccactgtgaggaggaggaacaggtcttggctgagtccaaggacccctgggccatggtggggccacatggggaggtgaagagaaggtgtggggtcctcgtggggagacagtccttctctcaagcttgctgccagggagctggggataggcctgctgtccctgcctcaggagaggctgggcgggggccgctgttgtgactgaacagcaaaaaagcctctggcacagagccccccgcccccagccttcgggcctgaacacctaccatgcctctccctcttggctgcgtggtgtggccaggcgagggaacgctcactctccagccattccccacatggacgcaggcacagcctcacccttttagggtcctggacagccctggcttcctgatatttaaaggataatgaagactttggaatacttccaagaataaccacaaatatgcagaatacagaggccctaggaggggggacagagggaaccaagttcccagtcagcagcgggaaagatgtgaggttggagggggccttcatgctggtccctgagactgcagggatctgaaaatgagacctcacgcctgctggggcagagcagagagggtgatgcaggaagcctcctggaggcaacgggcggggcctgggccagtcactgaggaggcgcctggctttcctcctgtacaggaaagggatggggtgcccgtataccccacagcgcaggttcccgtcaacctggggtcctcaacacggccctcagaggggccagggaagcctttcagggtctgggcctctcccaggcttgacgattcctggtaaatggaaccaaatcccaccacaggcctgttcaggggtgcagcagccaccaccttcaccagatccttggggagtatgtctgtgcaggcagttccagcgcacctcaccccagccctcggcagtctacaccggggttgccctcaatgctttagaattgggtctgaaggagcagggaataatagctaaagggtgaaagtaaaaaggaatggagacaatgctggcctcagagccctcaagacgctacagctacccacattagaggaaaacctgggggtggaccagggaaggcagacctgggggagtgactgcccatgaggatgggtttctttttggggtgatggaggtgcccgatagttacatagtggtgatattcatacaattcttcaaatttgctaaaaatcactgagttgtccacttgaatgagtttattgtatataaatcatgtcacaataaagcagatcttcttttttttcttttttgagatggagttttgctcgtcacccagaatggagtgcaatggtgcgatctcagctcactgcaatctccacctcctgggttcaagttgattctcctgcctcagcctcccgagtagctggggttacacgtgcccacaaccaagaatggctatttttttttttttggtattttttagtagagatgaggtttcaccatgctgtccaggctggtctcgaactcccagcctcaggtgatccacctgccttggcctcccaaagtgctgggattacaggcatgagccaccatgcccagcctaaagctgatctttttaaagaggaaaaacaaaccaaccaggggcctgaggatgtctggtttgggttctggggaagtggaccctgaaagggtttgcaggcgacggctcctttgggaggggtccccagaagcacaggagggcactgaggcaggaggggaggctgtgccaggaagagggctgctcgctgggggtgatggggcatgagcccacagggagttctgggaaacactgagcacacgccacagacagcatggcccatggcggcctcggaggaagctgaaagggtcctgggtacagtgcaggtgggaaggagggggcaggaatcccagcctgcccaccccagatgggagaagccagcattccggcgcctcacgccagactcaaagccattcatttctgccctgggatgttggataagggcagcagacgctcaaggtcagggctgcctccccatgtctgtttgaagcccagctccggggcaccgttgctagtgggactctgctaggccggcagccatcctgttgagggtgacaggaccacccaaggggcttgtggtgcccaggacggggaccacacagggccaccttcctgctcaggaatacagagccgctgcgagccccctcagggagccaggctggtcccgagggcccagctttcccaagacgcacctgtggtctattcggagcctctgtcccctttaaaatgagctgtctttttattatcaggctatgtgtgctctttatccattctagatgttagaccttgtccgaggcctgatctgcaagtgttccctcccgttctgtgggttctttctctttcttgatggtgttctttgtagcgcaacagcttaacttctgaggaagttgggcttgtctattctttcttctgttggcgtcacatccaagagaccactgcctgaggcaagtgcgtggagatgctgtttggctccggtactctgaagaggcgcctgctgtcccaggcccactacccccgctcatgtcttttcctttccttcctccagattgtttcctatcttctcaccttctcctttgcagtctctgaacctggaaatctggggacaagctggcagcggttggggctgtggaggcaccgccccctccagcgaggtggtccccccgcatctgggccaacgtcagggagggaggatgctggggcacagggctcggggaggacacggggacccatctccagaaatcagccagcagggacagctggctggggaccagtccaaccgctcagccataagccatggagccagaagagggagctaacggctcagagctggagacccagtccacgcggcgcttacctgatggacaccgcgagggacagcacctccagcagcagggctgcactgaagaccgccagggcggcgggcgggggaggcacggtggccgcctcgtacttcaggaagcaggtggtggacagcgtcagaaacactgtggtcgacagaaacacatccaggagggagctgaaggtgggactagcaaacgtcttcacgggggagttctttatgacctgtgtggagcaggagtggagcagaatgactgggaggccatgggcggccaggagcgcagttcagatggagaaacaggcaacacgtgcggagcactgctgctctgggccaggcacagggcaggaaggctctcggagggctgtctccctctactaccccatttaacactggggagtccaaggcacagagaagttaaacttgcccagggggctgggcacggtggctcacgcctgtaatcccgacactttgggaggctgacgtaggagggtcgctggagcccaggagttcccggccagcgtaacacagtgagactccatctctacaaaaaactttaaaattagccaggcatggcagtgcgtgagtgtggtcccagctactcaggaggatgacgcaggaggattgtgtgagcccaggagtttcaggccgcagtgagctataatcatgccactgcactccagcctgggcaacatagcgagaccccgtctaccaaaaaataaaataattagctgggcatagtggtttgtgcctgtagtcccaggtacttgggatctgaggtgggaggattgcttgagcccaggagtttgaagccgcagtgaactatgatcacaccactgcagaattataccgtttccgaaaacaaaaaaacacaaaaaaaaccctgccagggtcacagagcaactgattatgacccagcacattctcatagacacattatatatttagctgcaagatgagttactgactggcgcaggtgaggtccctgcatctgtaaggcagttggacgagagcaatgtgcagggcggtcctgctgcatggcggagtcctaggttcagcaggtgcgaaagcggggcttcgtggcggaagtggccgacggggatttaagtggcacatcatcgcctgggaacctacggggcctggctctgtgctgggggccagtacactagagaggcacacactagtgttcggcaattgagggggagaaataacgatgctgacacgtccaagaggtgaccaggcccaggccctgcaaggctctggggaggtgcgatctccattgacgctcacggcaccccacaggcaggaactaccacccatctcggtgtacagattgggaggccaaggccaggggctacccctagggcacacagcgaacaaggagccaggccaggacttggcatggaccggttgactcctgagtgtgtccctaacctagaggaaggtgtaggatccaaaggcagaggctgtggttgggagaggaagggatgtagccagttcagctgctttccatttggccttgcaaccttctggcaacccctgagaggccatgggtgtccactcagcatcccggccaggctcggggctgagggcaggagctggagacgcacggagcggaaaggtctcctggcagccctgggtgcggtgtgcgttctttgggacaaaccagctccgggtgcctcgaccactcccaggaactaggtgggagggcaggaggggcacttggacggtgggagcaaggctgccagtcagccctgatgccaggctggaccctgccagggcaacctgggggttagggtttggttccaaattctctccaaggaagctggaggctctgtagtgcccaaaagggcaagtcaggtcccagccctggaatcccctcagaaggtgtgggaatttcttttttttcatttttcttttcttttccttttttttttttttttttttgagatgggatctggctgtcgccaggctggagtgcagtggcgcgatcttggctcactgcaacctccgcctcccaggttcaagcaattctcctgcctcagcctctggagtagctgggaggacaggcacccgccaccacgcccagctaatttttgtatgattagtagagatgggatttcaccaagttggctaggatggtctctatctcgacctcgtgatctgcctgcctcggcctcccaaagtgctgggattacaggcctgagccactgtacccggccaggtgtaggaatttcaggggcgacactgcccatgcccactcaccttggcagaggcccacgcacgtcccctttctgtggggctccatctagtgcccgtcaggggttcgagtcagggccgggtgcatgcatgtgatgtccctgagacatcactgccttgcccacatgtgaggccggaaggtttccacgtgggctgccgtccttctgagagcccacacctcccaccttccaagccaagggctcgggtacagggcctttcctgattggggctgccatctcctctgtagaactgccccatccatggacgctgccagaggccccgctcctccctccacctcccttgcagtctctcctgcctgccctgctacttgccagagacacctgtccctgccacagcctccccctctgggccacccctggccctgatgccagaggctcccaggcccatctgccccacccctgtgcatcccgggagtgccacctgtcccagtcccactgagaacgacgctcccccacatcatgacactctttcgccctctctccccatgggcgaaacccagggacagtgccactggctgccagggcaccgtgggccaggctccgccctgctcactacccacatcccagggcctccgggtgcggccgtcccaccatcatcagagcacaggctctgcagccgggctgtctgggctcaaggccactccaccatgattagctatgatacccacgcgtccatgcctcagtctctttatccaaaaccagggataaaccagtacttgcaccttgtgggcggtgggatgctcggctaagaacgcacccacgtggagcccccagcacaatgagtccccaaacgcgggccagctgggaggctcccttgtcctggcatctctcctttcctccccaccgggaccctgtggccacctgccctgagtttcggtaacagcctcccacctgtcatgtggcctcctgtcttgtccacactcttatcaccctccgaaactcagctgatacatgtttgttttttttctttttttgagacggagtttcactcttcttgcccaggccggagtgcaatagtgcaacggcatggtctcggctcactgcaacctccgcctcccgggttcaggcgattttcctgtctcagcttcccaagtagctgggattacaggcgcccgccaccatacctggctaagttttgtatttttagtagagacggggtttcactatgttggccaggctggtctcgaactcctgacctcaggtgatctgcccgcctcagcctcccaaagtgctgggattacaggcatgagccaccgcgcccggccatgtttttcttctttttgttggaagagacagggtctcactatgttgcccaggctggtctatctactggcctcaagtgatcctcctgcctcagcttcctgagtaattgggattacaggtgtgagctgtgtgatctttgtaacacaacctgttccagatccttcaacagctccccatggcctgtggcataaagtccatggcatgggagccgtgacctggcccctgccacgtcctgccactcctgccccaccctgccccggatgcgcctgcaactccctggacgaaccaggctctttggtatctctaacgtttgtgggtgctggccccactctccagaatgttccctcatcccacattccattaattcctagtccccccactgaggcaggctcaggagttccccccttggagcccccagcctgggcttggtgcctcgccgtgtgctgggagggcactcgcagacctccagctccggatgttgtttctaattcctgctccccatcaggccacgtctttcccccttccccagcaccaagaacagtccctggcagagcagaggctgagcgtacatttggtgcctggaggaaggcatggcaaaggtgtctgctgtttgggaggctcagcagtgcagggcgagaagcggcccggacgcctggtttggcagccagaccactcgtgtccgaccccggctatgggaccacagccacctgttcagccttgctcagcgtcagctctttggtaaaaggaggataatcatcagcttccctacagcattgctatgagcattaaatgagacgatattttgccttacgggccaccaaccagccaactgccaacttgcaagtccactccgggagccatgtctgggacattaacggatattcactgtcccttggaggctgacggaagggggcacctcccaccccacgaggcatgaactggctctactgggctcaccagggtctctctagagcccaagccaggacaccacggagtttaatgaagacctgctggaggaaccaagggaatcagagtgagaaatcccttttgttccgggtggggagggcatccactcttgacttgggaacactcagaggttaggtttgggcccagaggagagaatgcagtctggaagccgccaggattcaaaccaggctctaggttcttgtattattccttccagcaaccccctaaggagcacttgtgagcgctgggactctgctggaggctgtgaggaggggctggaggagagagatgggtgttgggactgtgctggaggctgtaaggaggggctggaggagagagacgggggtcctacctcacagagctgagcatctagggagggaggaacacgaatccagaaccacacacggaaagattccaaaatggggcacacacggagaaggaagtgtatgaagggaagtacaatccagtctgcagtcggggagagcttcttggaggaagtgggattgggtgatgggctgagaagtcaagtacaaggggttaaggcggtgggggcgggagagggaacatggagccggagttagagagagaggtgaaggcctcctgggcccttctcaggggaagaaagcagggagggcaacagagaagagtctcacccaagactccaggacaggtgggacgggggctcttccagggcaggtcggtggggagttcccttccagggcaggtggggggttcccttccagggcaggtgtgggggattcccttccagggcaggtgtggggggttcccttccagggcaggtgtcggggttcctttccagggcaggtggggaggggttcctttccagggcaggtgggggaccccttccatggcaggtggggggggttcctttaccagggcaggtgtgggggccccttccaaggcaggtgggggggtttccttccagggcaggttgggggtttcctttcaggacaggttgtggtgggggggccccttccaaggctggggatagcctggagatgccacggcagaggaaaggggctagtaatggcgaggctgcgctttaagacaaaggactaaagaaagggtttttttcctcctttgcaaagagacatttcatgtacagttgccacttagggtttacagagtgtgggaaatcaatgttcgccttcgtgttcccatcccttggtaaagcacaaaactaacagtgaatgaccatgtgagaacaacaaacacattctttagtaaaagcgcaaggagaaatgaacgcacctcttcctgatagctggtcctgtaggatcgctccagctcctgatccaggaagttcaggctgaactgattaatgggcggcttaaaaaagtaatctttcatcaggctagaagacacaacaaatgcagtcgatcaatacccagcaccataactgtgccaatgttttcagatcataattagctaccaaaacgctgctcattaggtatattacaacagctgcgtctaaaagcgcctgtggaacagacgccactcagctgccccttgttaaaacagatctgtggaaagtccttcgcacctcaaagcataatcatattttgtgtttcaccttcgttaaagaatgaccatccaccatgattatagcacacatcatcagaaccttggttttttggggttttttttttttgaggcaaggtctcactctgtcgcccaggctggagtgcaatggcgcagcgatcttggctcactgcaatctccgcctcccaggttcaagcaattctcctgcctcagcctcctgagtagctgggattacaggcgcctgccaccgcacccagctaatttttgtattttttagcagacgcggggtttcaccatgttggtcaggctggtctcgaactcctgggctcaagagatccacccatctcggcctcccaaagtgctgggatgacagcgtgagctgctgaggcttgtttttgaaaacacattcctaatgtctaggattaggagaagatgaaggcagcttttctgttctttgaaacaatcttttgtgaagaacacgcagatcactgtgctgagagtacttacatggatttggaggcttcaaacgaaaacataattcagaaccggcggtcctgtcattcagagcactgacagtaattgccaccgtaaaagctaacaggttgttatcacaaaattgtgtttatagttagcgtaattttggtgctattgtcacatatgcagattgcatgtgaaacctgcagaatgataaagctcagtgattttaatagcagggaaatcaaccccgctttccatgactctttcattcatttatgaattgccagcaaatagtaatatcctttctatactgcagaaaattactagaaactaagggaacgttaacatgatttcagaaagcaaatatagctgtgttagcctctctccctcatacagtgactatcagaagtaaattagacgaggctgggcgcggtggctcatccttgtaatccccagacctttgggaggccgaggcaagcggatcacctgaggtcaggagctcgggaccagcctggccaacatggtgaacccccgtttctacaaaaaatacaaaaattagccaggcctggtggcaggtgcctgtaatcccagctactcgggtggctaaggcaggagaatcacttgaacctgggagatggaggttgcaatgagccaagatggcgccactgcattacagcctgggtgacacagcaagactatgtctcaaaaaaaaaaaaaaagagtaaatcaggtgaaatatgtcaagtgcctcatgtgccccccacacaaagtacggctcatcacgtgtgttccttcctgtccttgcagcacggcggacactctcctttctgtgacaggtatccagtaacttccaacattctcagactcagaagagaaataattctgtcccaggacactgaccctctctcctcccctgactcagggagtgtggactgagggaagagcaaccacgcagctgcagagaggatgtgcacaaggccacattttagcagtcaagtggcagaagcgacactgctattagctgtgctgctccatttatttcttatttgttttttgagatggagactcgctctgttgcccaggctggagttgcagtgctgcgatctcagctcattgcagcctctgcctcctgggttcaagcgattctcctacctcagcctcctgagtagctgggatgacaggcacccgccaccacgcccagctaatttttgtacttttagtagagacggggtttcaccttgttggccaggctggtcttgaacccctgacttcaggtgatctacctgcctcggcctcccaaagtgttgggattataggcgtgagccacagcgcctggctgaaaatcaccctttgaggcattatagtgaagacagaggcaagaatcatcaatgaatgttaaatctagggaattctgatggggaatgaaatatgtacaagatcttcaagtattttctcacagattgcttattagtcataagaggaatataataaccctagatgagacaacccggcaccaccttgcctaattaatcaaaattagtatcactaatgaggaacagacgggcactgcgtgtccctggagaggacaccctgaggaggacacggcatcccttctgcagtctctgcctggccagagggagagcctgaatctaaccaatccaacttcaggaatatttgataaaaggactggacctgtatttttcaaaaatgttaccattaggccaggcacaggctcacacctgtaatcccagcactttaggaggccgaggcgggcagatcacctgaggccaagagttcgagacccgcctggccaacatgttaaaaacccatctctactaaaaacacaaaaattagctgggcatggttgtgtatgcctgtagtcccagctacttgagagacctaggcaggagaattacttgaacctgggaggtggaggttgcagtgagccgagattgagccactgcactccagcctgggcaacacagcaagacctagtccttataaaaaaaaaaaaaaaaaaaaaaaaagccaggcgtggtggctcacgcctataatcccagcactctgggagggtggggtaggtggatcacccgaggtcaggagtatggagaccagcctggccaacatgatgaaactccatctctactaaaaatacaaaacctagccaggcatggtggtgggtgccagtaaccccagctacttgggaggctgaggcaggagcatcgtttgaacctgggagatagaggctgcagtgagccaagatcgcgccactgcactgcagcctggatgacagagcgagactcagtcttaaagaaaagaaaagaaaaaggcagagaggcttctgcctgcaacctttgctttttcccagacagccccagtcgtacctgtcttctttgataacgtccacaaagtgggcgtccgttttctcccggatgttcttgaacctcagcggaaggagagccgactggtccaggctcacccctgcccaccttcccttctcctgcaagatctcacacagagaagtctgactgttggtgagcttctcctcttggggagggctgaggagcccgttctgagttttgggattaggtcctccagaagcctgcctcgagacaaagaggacgcagacacgggaagtgaagtggcaccgggcactgggcacacacgcctgtcccaccccgacctccgctgcggggcgctgctgcactgggcgtgggactttctgacctgcgaggaacccccacccccctgcgcctacagacctgctccaatcccagccctgactgcccgtctgctccttcctgttacccaacagtgcccagtggtaacgctgggtgttcaggctgccaggacattgagacatgggaagagtcggtgcggaggtggaggggaagggaggaaagtgaggagccgaggcccccagagtctgcttaggccagaaccacggttctgggagcagggtgcatgggtcgggggtccaggagaagtatgacgaggggtccagggctgtcagggcacaggcaaggtggatggaaacgggctcgtgtcgtgggtgtcccccgtggctgtgggaaggcatgggatgacctgcacctgcaatcctttggcagatggagagcagatggaggacgagagcccgcgccccaggtgagtcgcctgcatgagcccccgccgacaggctctcgcgggtgggctgagtcctggccctggtgtccaagtctggttttcctgaaagccttcctgccaccggccctaactcccaacctctctcttcacccagcctttctcgccgtgaagaccccctcttgtctctgcccgtctatattctctcataaactgagtccagcttccagtaccacaaatcccctcccggcactcgaatccacgcattttaaacccttattggcctttaaaggaatcccgcccagctcagcccctgagcgctggtttccacgtgggttgctgctgaccctccctcgagctccctgccggtctcttcaacacccggaggacccgcgggtgcggagtgctgttacccaagaggagttactctcagaactaagaagtcgacaagacaggaatgtcaccttgggtggatgcgccaggagaggaactgacaggaacaacagccatgagcttgttaccttggtgctgtttttatgctcgtcttggcagccgttttgaggtgctcctccctcggcgccggcttcagatttgggagcaaatgtgattccgcacgaagggcaggtctagaagaaaaacacagactgtggggacacacccagaaaccgcgactgccaccctgaattcaggcaggtccgctgttgccatctgccgtcacgcagcatggtggtgagcaaggggaaggcacacagaaccgctcggggatgagctgaaagccaacgggcaaagtgacagtggaaacacacagaaacccgggcacgaacgcaacaggacccaaaaatggaaccgggaatgttcactgactgaacaatggatcaacaaactgtggtctattcgaacaatgggatattactcagccacgaaaaagacggaagcactgacgcctgccacagcatggtgaacctcgaaaacattatgctcggggagggaagccagacacagcacagatattacgtgatcccgtctatgtgaaatattcagaaaaggtgaatccttggagggagaaggcagattcctggctgccaggcgggaccgggggcaggaagggggagtggctgctaaggggcgtggggtttgctacgattcgaatgtttgtgccccctcaaaagtcagacgctgaaatcctaattcccaaggggatggcattggggggcaaagccttgggaggtaattaggtcatgggggacaagccttcaaaataggattagtgccctcataaaagaggccccagaggaatccctcgtcccttcgccctgggagaaggcaccatctgtgaagcaggaacgggtcctcactggacactgaatcttccgggaccttgatctcggacttcccagcctccagaaccctgagaaatacatttctgttgtttaaaagccacctggtttgtggtatttcaacagggtttctctttgggatgataaaaatgttctgaaattgatcacggtgatggttgcacaaccttgctaaatatactaaaaaccactgaactgtacactttaaaaagatcgatttttaaatattttttgagatggagtttcactcttgtcacccaggctggagtacagtgtcacgatcttggctcactgcaacgtccacctcctgggttcaagcgattctcctgcctcagcctcctgagtagctgcgattacaggtgcctgccaccacgcccggctacttgttttgtgtttttagtagaaacggggtttcgccatgttggccaggctggtcttgaactcctgacctcaggtgatccacccgtcttggcctcccaaagtgctgggattacaagcatgagccactgtgcctggccaaaaagatcgattttatagtatgtgaattatatctcaacaaagctgttattaagtaaagaaactggccaccaactatgcgaggacacaaatccaaggttcttaagctccgtgtgatggtgagctagtctcataagatgggctgaataatcaaaggtacacgatttccagatctaggcgtacttaaaagtttataggaattaatggacctagaaaagagaaggcaagatttaatacaggtaccctaaaaagagcaaagcctttatttctcataaactaggattcaaaccctagtcaagtacttactagtttggagactctgttcaaatcactttacctcagttccctcatctataaacaaagagtgaagatatgttgctaagaattaaatgaaattggctgggtgtggcggctgtaatcccagcactttgggaagctggggtgggaggatggcttgagtccaggaatttgaggccagcctgggcaacatggcaaaaccctgcctcaacaaaaagcataaaaattagcctggcctggtggcatgtgcctgtagtcccagctacttgtggggctgaggtgggagggctgcttgagtctgggaggtcaaggccgcagtgagctttgatggtgccactgcactccagcctggggcaaaagagaaagaccctgtcttaaaaaaataataattaaatgaaataagtatatatatagcctagcacagttcctggcatacagtatacccgtaataaacttattattattattaatgtgaccaggtaacctaggaaccatctaagaaagcaactaacagcttccaatgaagaagacaaaccgtggcaagaaatatatttttttttttttttggactcaaaagcaatttccttgcagcaagaagtgtaaaacattgaaataaattatgggaggccagatattattttggaaatttaaagtaagtgtcactacctaagggcaaagatatgacccaggttgtatttaaagttagactgcagacctgtactatattaaataaaagaaacaaagattctacagggttgtatagtttgggaatctgatgtaacatacaagctaaatttgaacatttgtatgcattcaaaaaatgaaaatatacatgccaaaacagctagcgaaatcattaattaacatatctgagcaaataatggcatctagataacatttgcttacagctctttaaaaactgacattatcaacagaggtaaaatgttctagttatcaataacatacagtgagtctatttgaaagcacctcttggtattgactggcagagttaaacttctaaacattttgctggtgtgctggctcacacctgtaatcccagaactttgggaggccgaagcaggaggactgcttagggccaggagttcaagaccagcctgggcaacatagggagaccttgtctctactaaaaataaaaccaattagctgaccttgatggcacgtgcctgtggtcccagccactcgggaggctgaggcaggaggattgcttcagcgaaggaagtcaaggctgcagtgcactgtgattgtgccactgcactccagcgtgggtgacagagcaaacccattctcaaaatacatatatatatgtataaatatgtatatatttgccaatgagaccactgctcttattaaatgtaaaaaaatctaacaccaagagaagaataaaataggtgtgcctgatacccatgcctaaaagatgcctgagggaactctctggtgtggctaaggtggggggcttggtgcttgatggggcacaccagccatttcagggcccaaccggtagaccaggaaaggaagctggaggtgtggaagcgtctgctgcacttggctcagccaaagcccgaagtgcaagtgcgtgctcagtaaatgctggtagtgaatatgaaaacttctgttaactatgctctctggtcattaaagttcatctggtaattcaatgtccttgattacagacagaacagcccttggtatctattcttctgtagccatttagtcacaggaatctcctggcgtcagtctgtttcaggtatttttcttgcctcaagttcatctgctgtgcttttctctctttttttgtttgtttgtttttttgggactgagtctcgctctgtcacccaggctggagtgcagtggggagatcttggctcactgcaacctccacctcctgggttcaagcaattctgctgcctcaacctcctgagtagctgggattacaggcgcccaccaccacgcctggcttatttttgtattttcagtagagatggggtttcaccacgttggtcaggctggtctcgaactcctggcctcaagtgatctgcctgccttgccctcccaaagtgctgggattacaggcgtgagccaccgtgcccggccaaccctcctgtgctttaagacgaggccgcctgcttcttcagtgccccccacggcacactggctttatgagattttctaagcatttagagccatgaatgtgtcaccgtgacagtcaaaccaacttggcaccagagggcacactgaggacagggggctccatgccctccacaagggcttccctcagaggggctggaaggccggtgcagcccgggcatgcccactgggatgaggctgagctctgggggcctggggcagtggtctccacaggtggggaactcagtgctttgcttacatccccttgaacagaggccgaggcctgcaccctgcagtgataagaagttctgatacagaagtgaggtctggcagagccgcccacaaatggcaaatgaggctgcgcttgcagaaggaagggggctgtctgggtcacatggccagctgtagacacccacgctcgggcctcctgagggccgggacagtgctcactgcctattccattcccagcaggtttgtccgggaagtgggagtatgggaggtggggggagagccaggtgcagactccaggccgcgctgggtggcatggtcccacagacctgtgtcacccggacccagcagccatcattttactgcactttgaaaatgcggattttggctgggcgcagtggctcatccctgtaatcccagccctttgggaggctgaggcgggtggatcacctgaggtcaggagtttaagaccagcctggtcaacatggcaaaaccctgtctctattaaaaatacaaaaattagctgggtgtggtggcacacacctgtaatcccagctactggggagactgaggcaggagagtcgcttggacccgggaggcggaggttgcagtgagcccagattgtgccactgcactccagcctgggcgacagagcaagattcctcagctaccttccttttgagggataattttctagataaaaactttcaaacaaatgaaacaaaagaaatcttagagctgggtgtggtggcttgcttgagcccaggagtttgagatcaacctgggcaatgtatcaagaccccatctctacaaaagctttttaaaaattttagaaattagctgggcacagtggtgtgtgcttgtagtcccagctactcaggaggctgaagtgggagggtcgcttgagcccaggagggagaggctgccatgagctatggtcatgccactgtactgcagactgggtcatagagcaagaccttgtctctttaaaaaagaaaaaagaagccaggcgcagtggctcatgcctgtaatcccagcactttgggaggccaacatgggtggatcacaaggtcaggagattgagaccatcctggccaagatggtgaaagcccgtctctactaaaatacaaaaaattagcctggcgtggtggtgcacacctgtagtttcagctactagggaggctgaggcaggggaatctcttgaacccgggaggtggaggttccagtgagccgagatggtgccactgcactccagcccgggcaaaagagcaaaactctgtctcaaaaaaaaaaaaaaaaaaaaaaaaaaagaaaagaaagaaagaaagaaaagaaaagaaaagaaaagaaaagaaaagaaaagaaaagaaaagaaaaaaagagaaatccatctacccaatggagagattctcacatctcaacatccccttctgagctgtagttagaggccccttctgtaccaggagggtcccaccatgcaatggtgggtgggtttgtttccctcccctgacctcctaccccccaacccccatggcaattttccttgagcgattcattagcttaattttaatctggattaagacatttcacaacatgttttttgccaagtacagatgcctctgtgaaatgtttcccagccggctaaacagcgtctccccctgcacagctgcaggcatctccacccctgctgagaagccctccctgggaagagtatttctgactccaggaagctgcaggcatggaagcacctcactgccttgggagacaaccctagcagctggctcacagggagccacacgggcaggcacattagagaaaaagcagtgtcataatgacagtagctactatgacttaggaatgtctatgggccaagatcctacccgtgaacaagtcgggcccccatccacgcaatatctgcagtctcgactgtatgatctcgtcctttgcagccacactgtgaggcagcaatgatcattccgcagacggccacagactccagggccctgggacccggaccaccgtcatatggctctggccccctttcctggcacaaggaggacccaggaataatcctggcaccttgctctcctgggccttgtttccctagagtgacctgagcagctatgcctgtcctcctggttcttccaagcagcaccctgggccctccggcatcaagggaagtctcaagacttctaaggtcctcccagcagcacgcctggcgggccagggagtttgctggctgttgcctgggtaacctgagattccctggagaacgcccaagagcaaactctgcatttttccggattatctttgctccttcccccatgtggacgtgggctttggagggaagagtgtagccatttctctaacacacttgggcacatttgcatttgtttttaacacatttcaggacgtgcaccctacattccggtcaaaatatatggcacaaagctataaaatcgttttttcttcaaggttatttctcatcacaagataaatcatttctaagccaacagctgtcccttttcaaaactgtcaagggagggagtggggaaacctcttttctcagaaatgaggaggatacaccagtagaagagccctggctttgcctgcttcgtcttctcaacacgactgttttgcaagatgtcgtgttatcagaagcatcctttgctcccaaactcaaaatgatgttaacatggtgagcaggaatagtcatgatattgcaaccacaataaccacaaacacaatttcctgaggtgttctttgaaactccttgtatctgcttaaccctcgtaagcaaccacgatgcaggtactatgatcggttccattttacagatgaggacactgagacagagcaagcactggcccagagccacacggtacggtcggaaccgcgtaaagaggcggtgagcccaggcagcagagctcctggccccaacgatctccaggtgaacggggcagcctgtcagtgcggcagagccatggggctaactctatgtccctggcattgctgtttaagctaacaggttaggtacgggcataagtacaaaatagagtatttctgctaatgcaacattagagaaaaatagaagcagaatattagaagaaaagataagcagtaattatcacagaaaaagaaattttcttacatccccaaagcagtaagaacagacagcagatggcctgagaatactagacaagtcaccacatgaacacacacgtgtaaaactcacacacacaatctcagagccacacggggcggagtcgaaaagtccctggacctctcactcaatcccttagccctaaaggaccactgggctcaataaccaggctggtgatggcgatccgagtcaagaatagatgaaaatatactcagcagactgtcaggcaggaagactgttaccagctgtggaaacagtccatcatgaagtcaagataagaaaatatttggcatctggggaaatttcatggaaatgcaatatttcactctctggcaatgccagttcaatgattccgcacatacatttccatccctctctctacacacacacacacacacacacacacacacacacacacacatatataatttcttactttgaaataattttagacttgcagagagtgggaaagacagttcaaggactctgcatatatcctccgtacatactcaccgtacagttatcaaaaccaaagcaactcatgctggcgcgataccgttaactaagctgctggctttattctgatgtccccagtttccgcaccgtccctttgctgttcgggtctcctctaggtcccgtgttgcatttagccctcatgccccctgctcacccccagcctatgggggttcctctgtctttctctgtctcttctggccctgctgcgtttgaagtcccggccaggcattttgtcaaatgtccagatctggacctgcctggtgctttctcagagcagactgaggtttggggtttgcggaaagaatgccgcagaggtgacatgcccttctcagcacaccacactagggtaccggatggcagtgagcagggaggctcacctggatcatttggtgaaggtggcatctgcccggtttgtccactgtgaagttcctattcctaccccgccccccacctttcttttttgagatggggtctcattctagtgcccaggctagagtgcaatggtgcaatcttggctcactgcagcctctgcctcccagactcaagcgatcctcccacctcagcctcccaggtagctgggattacaggtggataccaacatgcctggctaacttttatagtttttgtagagatggttttttttttttattgttttttttttttgagatggaatctcactctgttgcccaggctagagggcagtgacatgatctcagctcactgcaacctccgcctccaggttcaagagattctcctgcctcagtctcccaagtagctgggactacaggcaccagccaccacacccggctaatttttaaatttttagtagacatggggtttcaccatgttggccaggctggtctcgaactcttgacctcaggtgatccatctgccttggcctcccaaagtgctggaattacaggtgtgaccacctcacctggcggagactaccctttagttttacaacagctttcttaagatgtcatttgcaaagcatataatgcacccatttaaagtatataactccagggtttatagcatattcacagggatgtgcaagcatcaccactatcaattcagactaccacttataataaatacctatttaatttctaagctatatatatttatatatgtatgtgtctataaaatatgaaatcattttttcaatttctataacgaatgaaaagccccttacttcctcaaattgggccaactgagcctactcataatgacttgacacatagaaaacaagtagataaaagaagttatcatttagggtcattttcaaaattcactgtcacaaaaggatggttcctgaggtgagtggccttaaaggggaaggagaaaccttttgaaagcaggacaggtcctctctgaatcatccccgtatgggtaaatctacatcactagcttcattactgactggtccatgtagaaacacccagtggccaagcagcccggggttctgaataatagatgaaggtaaactcaggaagaccagccacgcaggtgcgctccagggaggcctttcagagatgtactaagatgctttcacagctcaaatggttccctgatcagaagtaatgtgatacaagtaattcaattttgggttttcttttcttttcgagatggagtctcactctattgcccagtctgaagtgcagtggcgtggtctcagctcactgcaaccttcacctactaggttcaagggatcctcctgcctcagcctcctgagtggcttaggactacaggcatatgccaccacacctggctaatttttgtatttttagtagagatggggtttcaccatgttggccaggctggccttgaactcctgaccgcaggtgatctctctgcctcggcctcccaaagtgttgggattacaggcatgagccactgagcccagttgggttttctttttcttcatgaagatgttggaaaagctgtttttattgatatatggcatctagatccactcatcacccacagggttcatgagaaaatggaaagcaaatgcctgctggagcgctgacgtcacattcaacaggccaaggcacacatgctcccgtgtcatacaagtgacttggttacggccgagagcatccaacccacagcaatgctcagccgcaatcactgtgagaatctccctcgaatcggaaccgtggagaagatgggaccttccccagagagtcagtgacttcctgcaggcaagctgggaccgtctctcggcccctcccagtcctccatggctccgtctgtggtcactgtccctgctctgcgtggagtgaaggcgtgcgtgccgagtgtgagcgaggcttcttctcagccctggcgtccacaggcaccattccggctcatctcccagcaatcccgagaggtctcttccttatcaccaccgcactgaagaggaaaactctcacttagaggaattaagtgtgtgtttgctctttcttttctttttttttttttttttttgagacagtgtctcattctgtcaccctggttggagtgcagtggcatcatcacagctcactgcagcctctaactcctgggctcaagcgatcttcctgcctcagctgtctgagtggctaggactacaggcatgagccactgcacctggctgcagtttcttcacagtcgcaaagccaaggcttgagaagggtcttgcttcaagttgcgcccctgcccgccgtggtccgcctcccctccgcgacgctgacagtggcgtcctcatgtctaatgcttactccttggtttccttcttgacctctccttccttcactcgggcagtatctgtcccccacattatgcaatgtcagggcccttaggatgaggacctctcactgctggtcatttcaagaacccaaggccaggcacagtggctcatgactgtaatcccagcattttaagaggccaaggcaggaggatggtataaccccaggagttggcaaccatcctgggcaatatagcaaaaaaaaaaaaatttaaaaattagctaggcatagtggcacatgcctgtggtcctagctactcagcaggttgacttgggaggatcacttgagcctgagagtttcgagctgcagtgagctaagatcataccactggtactctagcctgggcaacagagcgagatcccatctctttaaaaaaaaaaaaaaaaaaaaaagaagccaacacttgggtgtagaaagggttccctttgagctatgacttcaggaccaaagccctggcctttgacatcactatcatttcctggtaggtcgttacagtacacaggttatgttacattagataagaattttccagctatgacctaggagatgacttaaggtcacagaggacacacatgctaagggcaggaaataaacccttcgtgggcgctgccctggttctacacagttctgctcgggcttctgacttcagtccttcgcctggctctgcagagctgcatcgctccatgtgtttaattaaagaattaaaaagccaaaaagaaactgttaattactacatgccaggcaccatgctcgacacttgggaaatatttaagttatttaacactcagtctctgaatgcaaagagctcccaggaagacgcataagaaacaaagatttaagatcgtgtatgttacagccaagtgggacagactgaagggactgagaatttggagacgagggaacagcgttatcagctgcggaggcacgggaaggcgtggtggagctgaacggtgaatgcagacaggagttcaggggaaagagaagccatgagtatctcaagtgagcagcagcaggaacaggacacacgtgaaaatctacgcatgctccttcagggaacgtttcctgaacaccttttctctaatgtattggtccttggcatgaaactccttttactacatgagcattcccccaaaaggtgtgaccacattagccctgcaaggtgcagcttgaaaaaaaacaattgtgctcaaagaggcctgagaatgctgtatataccgcgtcctcctctgaaggcctagctactgtctactagcctagtgaaggctccgagaagtcctgcagtaaagaaaccctttctgtgttgaatatcccaagcttcccgaatttactttaccactgagcaccctcctccctttttttggagacaggacaaggtctcactctgtggcctaagctggagtgcagtggcaaaatcatagctcatgcagcctaaattcctgggctcaagtgatcctcttggctcagcctcccaagtagctgggaccgcaggcacaggccaccaagcccagttaatttttaaaatttttttgtagagatgatgtcttgctacgatgaccaggctggtctggaaatcctagcctcaggcatccctcccacctcggccgcccacagcaccaggattacaggcgtgagccaccatgcccggccttctgtcaacttgatagatcacaagattctcagaaactttcaacaatatttggaaaatctccacatgccaagaagatacgctaaatggtttttgctcattccgaccaaaacaaatatatatgactagagtgcaatgtagtgtagaatcgccattgctaaaaccgtggtcactaaacccgtgagcatgtgatatggtgaactctgcgaccgcatcccctaacggacagaaacacacatatgtggaagctaaaatggcaaacacaacgaattatatatttttggctcggggctgtctttcacgacttaaatacagctcagtttgcaggctggaggaaacaattcttccccaaatagcaaaaccattcccgattccaccccacgccagcccctccctgcccgggtccgctgtctaggagcccagagctccattttctgactcctgcacaacgtcagcccaggcaaggcggctgtctctaaagtttgcaggcatccagggaatctcagatacatgagctttacacatgtgccaagagtacagggaagagagggtccaacaccactgtcccggtggttttcacccaggggtgactctgcacccccaggggacactgggccatgtctggagacatttttggttggcacagctggggagtagggtacgggtgggtatgctgccatctggcaggtggcggctagggatgctgccagccatctgacagtgcacaggacagccccacaacacatgactacctggtccaaaatgccagcggtgccaaggtgagaagccctgcattacactaacaaagcacccaacgaccgcgatccacgagcggagttgacagaacccgagtgcaatcattacgtgtaactgggcgacaggcactatgtattctgacccagtaagtaatctgcataccccagctgactgccacataatgaagactgttcctcgtaaataccaatagcggctttcaaacctgtgaatgaatgtggagaggcagggacgtattgggtgaagctgtaaccactggccgccatcctcacacataccccactgtgttatctgagaacacaaagcagcataggagagctgttttgattctctgtctcattttaagaatggagacagtagatgtttaaactataaaaataaacagaaggtaccagtggggaaactaaatcaaatgtgaaagcaaaggaacagctcataaactgaaatgatttcacacacccaaggtcgaccgcgccaattccctggtagtttatgatgacaggtcagtccagaaacgggcacttctaggcagctaccaggagatcccggttccaataatgaaatactacaatgttctcggcagcctgtcctctcagtgagctgtgtcctaggattcacccacaccaacatcatttcaagtaatcataaaatagtggatttcaagagacgtagaagtatttgagaaagtggtctctgaaatcagattatcaactagctctccacccaaggtgccaaggaaagccacctttactgtcatttatcaccagcttctagaaatcccaaaaggcaccacaggtcccaggaagagaaaataactaataattcaaatgagaagcatccttgtgcaatggaaaggcaatggaggtgcgtcatatgtcaaaaagcaaggatgttaaaaatgcagaatgctactaactttagactaaatattaaaatcgtgaaaaccaaatcgaaggtcattccaagttgtttgcctcagacctggaggctgcttattatttcacgtgctctactgcagaattaatagaaagttttagaagtaggaaaaaaaaaacaaaaaaactaaccttaaggttatcaaaggttttgacagtctgcgccaagtcactgacattccctgatgacgctgtcccctgtcccctagggcctgaggacacctgtgagccgtcaatgacctcaaagccagaaagcaaggcctctgcacagctgcagcgagactccttggctctctgacccgatatcaggtatgtcttcaaacctatgatggataaaagttacagtcagcacagattgaaagcaccgtctgttgaaacgcagctccgtcttgctctctggagaggactcactcctggaaagttgagagtaaagtgaaaatgtgaataggtcatagtttacgacggacgtccacgatctctccagagagatgcggcctcagggagaccgtgggcccccgagacacaccactcacccacgttacgttttcttggagtaatggctgcatgtttcatgttttaccttcagggttaaaataagcattaaaaagttcctccatgaaagggtcccaggacctccccgtgaaggcagcaaagcagattggttgaccctagacactgctttggtttatttccatctgtgaataccagtccagtgagtaccttcctaacggtcagtctagacgtcatggcagcttccggtactgaccatcttacctgtgtcagaggctgcaaaactaccccgaaaaacaagaccctaccagggaccaagaggccattaaaacctccccagactcagagctgttgagcatctatttcctgttggattcaaacactcaccccaggaacattcagcttttgttaagctgaggtccacatgcattttattgtctcacaaaatcccgcatatagaaaaaaaaaaaaaaggtggtcaaaaggacacttgacctgtatctttacaattctcctttgaggctgagctaacagccggacccacactgcgctggaaggagctgtgaacaggtgggtggatcctgccccgggaatctgctgggaagatggcaaaggagcagcttttctagaaagagcccaaggaatttttgaaaaagaagcaaactttatttaaagaaatccatcctttgacttcactggaatttaaccagatggcaaatgtatcggaaggagggacaatgtaatttaacatttaaataacatttatttcaggcctagtgtatgccacacaccgagaataaaatcatgaacaaagcagggtcccttcttttttttttttttaattgagatggagtctcactctctcacccaggatggagtgcaatggtgcgatctcagctcactgcagcctccacctcctgggttcaagcaattctcctgactcagcctgtgagcaggcaggtgtccaccaccacgcctggctaatttttgtatttttagtagagacagggtttctccatgtcggccagactggcctagaactcctagtgatctgcccaccttggcctcccaaagatgacaggtgtgagccactgcacccggtcgcagggacccttcttgaagggtttaagctccagcttcaggtcgtgaagggtgtggcatggaaagatgccatcgagaggcgacgtgtctacaacactgatcgactctggcttcttacgctgggtacatatttggtcagcgctttaaaattaattaatcagaaacctagggactacttcatcaataatcccgaatcattttataagtatggccccatctcatcacttcacctccctctctccttgtaaaaatactacgtggctaatctttttaagtcaactgttctgagaatttgccaagagtcctagaaacacgtaaagacagcctagaacgtagccaggtcatagctgagaatcaaaagacttagatatttttagatgccaactggccccaagaaactcttcatgttttgttttgttttgttttgttttgtttttcctttagagatagggtcttgctctgttgcccaggctggagcgcagtggtgcaaccatggctccctacagcccccacctcctatagcctcagcctcctgagtagctgggactacaaacgtccgccactatgtccaactatttctttctttcttttttgagatgggggtctcactgtgttggccaggctggtctcgaactcctagactcaagtgatccgcccatcttggcctcccaaagtgctgggattgcaggtgtgagccaccacacctggtccaatgaaaatctttcactcttacttagctcctgaacttttgtgcatttttttctccaacaaaaacccacatcccaatttatgcacaggatcaatcacgactgtaacatgtatacactgaaatggaaacgtgaactggaatacgacgcaggagtgaagccatctttatactaatttctcggacctgtcccaggcgacaccagactgactttgtaacttcactttgccagagttaaaaaatgcaacctatgtggactcaagagaggacaatgagctgccagggcttatacccgccttcatcaaagaagtacacgcaaggaggcctgtcctggggctgctctaagggtctccttcccatgactcctgagtgtggcccacaagtcaccaggtggcagggtggtgacaggagccactgacagccagtgtgactgtggatggccactctggagaccgcagtccccacatactgagagaggagggacatttttttgatgggaggtaggaaaagttgcggctgaaggatgaggttttccattatgtctgtggctggccctgcaaggtgctgttggctcagggtgcccctgcctgaggctacggctccccatgcacaagggctgccctgggagcatgaactgggctgcctctgaaacccaggaaggggccctcacccaggtgactgcgcacctgctccctgtgtggctccgggactgcaagagaaagtcaagatggcctctcctagaagtgcgtggcaactgaagctgagagaggctgagcagggaggcctgaagagctggagcacgacgggacagccagcacattcacagcgctcagcacggcagtccacggggagcacggagtggcagcggcggcctctgctcacaagctgggcacgtgcctcaagcacatctccaacgtctgctgttgcttttttgtactgggattactgagtcactcttaattcatcaaacatttattaagcacttcctgtttactacacactgatgggtgcagggacgatgtgtgactattttggccgagatcgtgacctgtgtggagcccattacctgaagaggggccaagaggacaagcaggtatgactatggtcaggcgtgccaagtcccaggacaaggaaggacgggtgctccaggaagcacaggagggggcatcttgagaagcctcaggaaggaaggggctgtggctcgaacgtgtcccctccaaagttcaggcgttgtggagtgagagtcttaaggaagcagggctttaagaggtgacgaggccaggagggctcctcccctgcgatgggatcaggcgcctgcataaaggggcttgctgtaaggggctctctcgcttgccctccagtttccttctcccttccagaagatgcagccctccccagacacctgaacctgctggtgccttgatcttggacttcccagcctcctgaagcatgaggacagaaatttccgtgctgtatagattacccagcctatgctgttctgttattgcttcacaagcagatggagacggacggatcagcaccctccacacggagaactgaaagacggggcgaggtcagcccggcaatagcaaaccaggccaggggcgggggtggctgacaccaggcaggggggttactagaacaggtcatgaaaggccctctacagaggtggcctgcagcaggcatagctaaaggatggcttggagctcagtgtggctggagcagagaacgtgtggagggaatggccagggctgagccacagcacctgtgcagggcactgtgtgggccatcctgggaagcctccattctggggccacgggcagcaggggggcgggaggagaaagaagagccacataggaggcatgaggcgtaggacaagccagggagccggtggaaatgccagccacagcgggtgggaagttgggaggcacgggagtcaggaaataacagtggaaacgggaaacctactccccacaaactgctggcgagaggcaaggctcccattacaagcaaccaagcgtgatgggcgagggcctggctgctggagggggcctcggagtcgggtccaggtccgccccctaatcccgtgatctaagtgagctgcttcatctctgcctctcagtttcctcatctctaaggggagggcaggagcagagctagtgagctgcttcatcgctgcctctcagtttcctcatctctaaggggaggacaggagcagggctagtgagctgtttcatcgctgcctctcagtttcctcatctctaaggggaggacaggagcagggctagtgagctgcttcatcgctgcctctcagtttcctcatctctaaggcgagggcaggaggagggcttaccacacagctcgcatgtgaggcttaaatgatcaacacgcacgcagcaagcactcgacattagctgtgattatcgacgcagtgtttgatctgcgtatcactggaatctttttcatgcaccttctacatacaaaagcatttgcaaaactgttaaatcaataattgctcctgatttgtttctgacttgagtttttctttaggaagcgctgaatgaccaacccatagtgataacatgatcctactagctttacgaaggtcaaacacacctccgtgtccacaacgagcaaaatcgggaagtaaattatctttttatttatgcttcaatatggaaagctaaatttaaagtgaaaccttttgtcagaaccagaagggttatcaccctgacaggtaaggcagagcccagctgcctaatcacaaacgcctgagaaatacatcaggacaggttactgagttcaagcccagcgaaagtcttaagtcaggagactctgcaggcgacatgatttaatgaataaccacacacatggaccctggggtccaagttcattagaatggctcttttgcagcagaaggtccaaaaaaaaaaaaaagacagctaaatgatttaagtgtagtgtaaacaggagaataattaatatgatttcttatattctttcctggttatccattgattttaaacctcaacaacagcgatgtcttttatcagcttaattttacaaaggctacagagaggggtgggcatttcctaatgggctcctgtctgacgggggaatttgtctatggctgtgtgcgtggaggttaacgcagttaacgttcttaagtattcttaagtatagtgtcacttctttgaaaactaaaactgcactttgcacatagtggtgatcaggtttggtgacccaagtataggaagagtgactgacaaagcccattttggaaaagagtgatgggcgaggcccatttctggcctcatttgtcccagtctctttctgtgggattcttgccttggactgagataccctcagccaccaagaatcaaggacctgactgccaactcaacagaaagagaacaacagcgaggcacggggatcacagctgtgaccccggcactctcggaggccgcggcaggaggatcacttgagcccaggagtttgagaccagcctggacaacatagcgagatcccatctctataaaaaatttaaaaatcagctgggtgtggtggcacctgtggtcccagctacccaggaggctaagatgggaggatcacttgagcccgggaggttgaggctgcagtgagctgtgagtgcgccgttgcactccagcctgggcaagagagtgagaccctgtctcaaaaaaaaaaagaaaaagaaaaacaagccaggcgtggcggcacacgcctgtaaatcccagctacttgggaggctgaggcaggagaatcgcttaaacttgagaggcggaggttgcagtgagctgagatcgtgccattgcacttcagcctgggcaacaagagtgaaactccgtctcaaaaaagaaaaaaaaattaaaagaaaaagaagaaaagaaaaacaagaaagagaagaataatcaggaaggaaagaatgttttaagacatgactttgggagccagccacatagcataacaaatgcctagaagcttacgtcacttatgacttaaaacaataaacagaaaagaggcaatcagcttgggctggttcagaaacattccaaaaacgtctttcactttgcattgcattcttcctcacgactaggtcggaaacgaccaagcggcatgagagttatttaaactaaactgtaatcagccaataagaaaaataaagataaaaatactcttaatctaccaaatagccaaagcctatggagtcatagatatattttataattatctattctttctgcgtaagaagaacaaaagttttggtacaaaagagagaatatctttcatatgttaacattaaaatgctctccggagggttgtaagtccttcctactcatatgcaccataaataatcataagaactgatttgttcttgttgtcccaatatttgatgataaatctcaagttcctactacaaatggctgctggtgaaacttaacctcttcttaacaaatgaagtcccaggtcaggcgcggtagctcactcctgtaatcccagcacttagggaggccgagacgggagcatcagttgtgctcaggagtttgagaccagcctggccaacatggcgaaatcccgtctctactaaaaatacaaaaattaactgggcgtggtggcacatgcctgtaatcccagctactcaggaggttgaggcaggagaattgcttgaacccaggaggcggaggttgcagtcagccgagatcgcaccattgcactccagcctgggtgacagagtgagactttgtctcaaaaaagaaaaaaaaaaaaaaagaagtcccaaataataaaatatgagatggatttatggaagaaagtgaaagaaacaaagggtaggcaccttgcctgtttaatttgatcttctgcttaaccaaaaaaaaatttttttgtttttttttgagacagagtcttgctctgttgcccaggctggagcgtagtggcgcgatctcagctcactgcaacctccgcctcccgggttcaaggaatactcctgcctcagcctcctgagtagctggaattacaggtgtgtgccaccatgcctggctaatttttgtgtttttagcagagagggggttttgccatgctggacaggctggtctcgaactcctgacctcaaatgatccgcctgcctctgtctcccaaagtgctgggattaaaggcgtgagccaccacacccagccagaaaataaaattttagagcatgtgcacgcattctctctctctctccctcccgcttccccacccctgcttctaaacaggtaccttctatacccagcttccctctctctcccagtaatggctaaacagctgccatcacagccaaatgggaatgacaggcatcccctgagtgaccacattcccctgttttggccttttttttttttttttttttgagacagagtctcgctgtgtggcccaggctggagtacagtggctccctcagctcactgcaagctctgcctcccgggttcacgccattctcctgcctcagcctcccgagcagctgggactacaggcacccaccactatgcctggctaattttttttgtatttttagtagagatggggtttcaccgtgttagccaggatggtctcgatctcctgacctcatgatccgcccacctcagcctcccaaagtgctgggattacaggcgtgagcgaccgtgcctggcttggcttcttatcttctgtattccgagttaataaatgccccactgctaaatgctacattccagaatgctaacatagggagagtccaggagtccacacacttcagagaccttcgcctcccacctctaagaaacctcttgaattagggtttactagcacgagccttcacaaagactgtagaaatgagtctctgagagacgacacccagcacacccagcacacccagcacaccagcgaacagcccaccaggtgctatcgctgtcattcatttgctcattcgctcgttcatgcacccagcagactaaatgtttactgagtacttaccgaaggttaggatctgggctaagggttgaaagaaataaataggttaaaaaagaaaaaaagccacctaggtgactttcactccaatgcttgacctcagttcccttgtctagataatggaaatgctggccggcgcggtgactcacgcctataatcccaggactttgagaggccgaggtgggcagatcacttgaggtcgggagttcaagaccagcttggccaacatggcaaaaccctgtctctactaaaactacaaaaattagccagctgtggtggcaggtgcctgtaagtcccagctactcgggaggctaaggcaggaaaatctctcgaacccgggaggcagaggttgcagatagccgagatcacgccactgcactctagcctgggtgacagaatgagaccctgtctcaaaaaaataaaagaaaaagaaaacgaaaatgctgtgatatgatggtcatatcatagcacagggctgttgtgaggattaaatgagttgattcaggtaaacagggacatccgaaaaagggaaagacggtgcttgtcctgagaacagctgtgaatgtgaggacagtcagtgagtgacgatctggacccacaagaagagagtcatatgcattcaagtccaagtgtctatgggctgttcagaagcaacaaatggcacttcaacaatgagttgcagacaacaaaatggaaatgaaggtctgcaataactattaagaatcctgtaacagagcagagtttaaataatgggaagaggctatgaaacaagagagctggggaaagataccagaactgaaacagaccaccagctgatcaccttttatttgtgaaatgacagcaccaaatgcaccagatgccacagacgggagggagggggataggtcacgtcggcagagggagggggtcaggtcacacctgcagcagggacgggggtcccagaccgtgttcttgtccctagagagctaacagctcatccgtaggtttctaagaggtgctgattcaagcacacagtgtagatgatgaaaaatagattatagaaagaagagaaaggaaaaactaaatttaaaatctgagactaggtagccactaaatacttgaaaacaaaaaaagggaatacactgaaaatggaaataaagctgtatgatgtttagttaaagaagccagtcccaaaaggccacgaactaggtgatcccctttatatgaaatgtctggcatagggagatctgtagacacagaaagcagatgagtggctgccatgggtttaggagagagagggtgtaactgctaacggatgcagggttactttttggggtgacgaaaatgtaaaattaggttgtggtgatggttgcacaacaccatgaatatactaaaaaccaccaaatcatacacttgagagggtgaattgcatcatatgtgaattatacgtcaataaagctgtttttttgaaaaagaaaaggaagctgggtgtggtggtgcatttctgtgatctcagctacttgggaggctgaggcaggaggactgcttgagcccaggaaatgaaggctgcagtgagctatgactgtgtcactatgctccagcctaggtgatagggtgagaccctgtctcaaatataataataatattaataatacaataaaataaactaaatacagtaatgtgaacatcaacaaggtgcaataattctgagatttagagaagaaataaaataaagctgggaagaaatacaccctccctgagaatacaaggtagagtgagcagtagcaggtaaatgaaaaatattaaaggcttagaaatagataatgtgggccaggcatggtggctcacacctgtaatcccagcactttgggaggccgaggcggggggttgcttgaggtcaggagttcaagaccagcctgaccaacatggtaaaaccctgtctctactgaaaatacgaaaattagccaggcgtggtgatgcacgcctgtaatcccagctacttgggaggctgaggcaggaggatcacttgaacccaggaggcagaggttgcagtgagccaagatcgcaccattgcactccagcctgggcagcagagtgaaactccttctcaaaaaaaaaaaaaaaaagataatgtggtagagctagggcagaaaaacatgcaagtcaagaataaggccaaataaccttgaagaactaaaaattcaacatagcaaaagttcagaagtctgggagagattaaataaaacaaaacaaaagaaaatttgaccttcatgaaatagctccaagaatcatccaatttgcagctctcactattgtagtccaacctaaaaacgccgggccgacacccacattgtcttcttcgagcacaaacacacttctcctgcagcaggtgtagcccgcacagcatggtgagcccagccacacccgcacgccagacgcttggccacagaaacgcagaagcggccactgtccttgcctggaacacagatgggccttttcatccaggaggagatttacttgcaaaggcattttcttctgacccacaggtggttatacctgcactgacacctcctgtgggcatcttcagctggaagaaaggccaccgaggctgcggagccacctcgcctgtaaacatcatatcatgcaaaggaaaagctctaagttgcggaatattcttctctttttttttttttttttgagatggagtctcgctctgttgcccaggcaggagtgcagtggcatgatctcggctcactgcaacctctgcctcccgggttcaagcaattctcttccacagcctcctgagtagctgggattacaggcacctgccaccatgcccggctaatttttgtgtttttagtacagttggggtttcaccatgttggccaggctggtcttgaactcctgacctcaagtgatccacccgcctcggcctcccaaagtgctggaattacaggcgtgagccaccgcgcccggctgatgctgaacatgcgtgactaaccttccgcgggagcagtcatgccgctgccttcaccacctgttgcttctgggaaatgtggatccaggctgctggctctctcccagatcgtatctgcagcacaggcacatgcttgctgtgaatttccacacttgtcagatcacccggttttcaacttgttttctagttttctctcttttgaagagtattttgcacactggctggggcagaggctgacagtttcccagactgtgttttcttgtttacagagcacatgcagacttgttcgagtcatctaacggagaaacccaaaaacctccattttctcctgagatatctctgctatctctaatttcacttcagcagcactggtggctgaaatactatggactatgtatttcggacttcctttttctgaacttttctggaagaatcgcagttgtgtgtgtgtgtgtgtgttttgttttgttttgtttttttaagagaaaaggtctttctctgtcacccaggctgcagtgcagtggcatgatcacggctcactgcagcctcgacgtcctgggctcaagtgatcctcccacctcatcttcccaagtagctgggatgacaggtgtgcaccaccaagcccaccttcttttaaaaaaaaatttttttttaaagatggaatctcactatgttgcccaggctgggcttgaactcctggcctgaagtgatcctccggcctcagcctgccaaagtgctggaattacaggcatgaaccaccatgcccagactcaggtatttattaataacctcaaggtgttgctgcacattccataagttgagagcaggtccactctgccacccagggatgtcccaggctgggcgatttgttctcccactgcacaccatgcaactgtcatttatgccttaagaaaatcccattgaagttgtggactcaatgcacaatcaaaactgaaagcaaaaccgaggcagtgagtagtgagtgcccaagcacgagaggaggggacaaaggctgggtccccggccatcaacaaacggagagctagctcataaaacagtgacctggagcttcagtcagcagccctcactcccaaaaggggtgaggagtcttcagaaactcccctgtcttatggcagaaagctgagctctgcacagaccctggaaaaaccactgttgtcaaaggagagatggaagtgggcagaaagcccaggaaggagggttccagactagtggaggtactagcctcaaacaagacagctgagtacttagagaagaagagatacatgccaggcatggtagctcatgcctataatcccagcactttgggaggccaaggtggaaggatcacgtgaggtcaagagtttgagaccagcctggccaacatggtgaaaccctgtctccactaaaaatacaaaaattaaccgggcgtggtggcgggagcctgtaatcccagctactcgggaggctgaggcataagaatcacttgaacccagtgggtgaaggctgcagtgagctgagatcgcgccactgcactccagcctgggcaacacagcagactccatctcaaaaaaagaaaaagaaaaagaaaaagaactttctatgaacttcccgtgatgatgggtacatcctgtagccgtccagttctgtggcctccaggcacatgtggctactgaccactcgaaatgtagctagtatgaacaaggaattaattttttaatgatttcaattataatttaaattttaaacagctacatgaggctggcagctatgtaggaagcagtgaagatccacatccttccttattggtgaaaggaatgaattggaaacagaaagttcttttttacctttattaaataaacgtgaagtcataagaactactaaaagaaaatgggtgggataaaagtaaaactaaatatgaaaccagtaagtattcactgttatttattatagatgacatttagacgcaaatacgagagggagagtaccctgtatattaatagcagggatagccaattacaaagtggaataagccaggcgtggtggctcacgtctgtaatcccagcactttgagaggctgaggcgggtggatcacttgaggccaggagttcgagaccagcctggccaacaaggtgaaaacccctctctactaaaaaatatacaaaaaattagctgggcttggtggcacacgtctgtagtcccagctgcttgggaggctgaggcaggagaatggcgtgaacccaggaggcggagcttgcagtgagctaagatcgcgccactgcactccagcctgggcgacagagcgagactccgtctcaaaaaaaaaaaaagaaagtggaatagaaacagttactctatcgaacaaaatagcagataatgttttagaataaagaaacaaaagagctggaaacatttgaacgttttcaaaaaaaaccctataagtgggatgagatactggttcacaactctaatttagagcctatataaacacattagcttgaccttgcttgacatacattatttctaaaaaatgttttaaatgtgaatatttagaagatacaccatattttctgctttttatatactataaattttactatgtgagtttaaaaagtggttggtaaaacacacacccaagctctctgatctttcacacccattaaaagcagcacatgtattaaacacactgctgcacaatgggcgtgccatgggtgctctccaaccgcattgggcttgaatgtttaactaggcctgaagccacagtgctaacaagatctggcagagacagacaaggccacgccggcagcaggtgtttcaggaaaggtattactccaccatcccttgcgctgaagccttagcctcaggcaaattcatgaaccaggtagaatctaattcaggtcactttggccaatctccactttctaccagcctcctccaggtccctactgcctcgggaggccccctacccacctgccaacctatcccctcaccatctaccggcaccaagtctgtgtgagcacactgtagatacacgagctccgtcccaactcagagctaggagagtatcagaggccaaacgcctgccccctgcttctgggctccaccagcagcctgggaggccaccccctgcagctgactcatctgcatactgagacttcctgacacaaatggaggtgacaatattcgttcccccatcatatcccagaaattcccttattgccgacatccattctgggtttttactgcgcttcacacgaggacaattccaggctgaagtggcaggtcccagcaccagactccacttcatcagaacacttctgttagagtctttgaaacgcatgaaatcccctttagggtccataataacgccttctggaaactcgacggcaagccactcaccctcagccctatcagaccccatggctccttacatttctgtgacatacttaatttgcaatgtcctcttttccatcatgaaataaaattaaattcatggacaacataacctttaatcactgagaccataaaggacacctccagcagctgactagccttccctcagccacctttgtgcccagcctaagggcagggtggcaccggagcctccatgcttcaaaggtggccaccagggcccatccccctttccatgcttctccctgcccagagagaaacagcctgaggacaggttaaagactaaatacaaccaggcatggtggctcatgcttgtaatcccagcaatttgggaggccgaggtgggaggatcacttgaggtcatgagtttgagaccagcctggccaacatggtgaaaccccatctctactaaaaacacaaaaattagccaggcctggtggcccatgctgtaatcacagttcctcaggaggctgaggcatgagaatggcgtgaacccgggaagcggagcttgcagtgagccgagattgcaccactgcactccagcctgggcaccagagcgagactccgtctcaaaaaaaaaaaaaaaaaaaaaaaagactaagactatgccacaattccgcatatgcatgtatttattatatacatatatgtataaggtacatatttgtatgtgtatatccgtgcatatgtgtatacctgcagcaattttttttaaaaggagaaaataggccagagccagtggctcatgcttgtaatccccgcaatttgggaggctgaagcagaaggattgcttgaacccaggaattcaaagcctcagtgagctgtgactgcaccattgcactccagcctgggtatcagagtaagaccctgtctctaaaatataaattaataaataaaaattaaacggagaaaatttcttaacaacttttatcctattcattctttcaacacataataagctcctgaaatccgttaagaatgagattagacctattctaaatcctactaacaccttacattgactctgtcttattaatctcagtactgtagtacctgggggaaggcgcagcaccgtggacactcagaaacgtcaagaatcaaatcacatctctacaacggtggtccatctgcaaacagcgtggagatcaaggaagggcagaacaaagtactgaaagtgctgtcatttctctggagggtgaattacacagaccaactttcttcacataataagaaacaagaagttgtttgtttatgggttctatgggagcacccgctgcaggccacgctagacgctggtgataaaactgtgaacatggcgtccatcacctgactcagtggtaggaaccagtggcagggagaatccacaagcaaggacccgagtcaccagctgtgattaagagccaggaagaaagcaaaagcttcctgcaatagagaatacccaacatgcggtttggacagagtcagggacgtcctttctgaagaaatgagactgaagtggagatatcacagtgagatggaggcaattgcggtggtgtaggtctggggaaggcacgagggatgcagggatcagcatggaaaggacggtcccagcatgctcacgtggctgaaaggtggcaactgttcccgatgcagactgagggaagaaagtgtggcatgagaggaggctggggaggtgggccaggccctgggagccattaagaggtttctgcctggccaggtgcagtgattcacacctgtaatcccagcactttgggaggccgaggtaggcggatcacttgaggtaaggagttcgagaccatcctggctagcatgatgaaaccccgtgtctactaaaaatacaaaaattagccaggcggggtacatgcctgtgatcccagctacttgggaggctgaggcacgagcatcgcttgaacccaggaggtggaggctgcagtgggccgagattacgccactgcactccagcctgggggacggtaggagactctgtctcaaaacgacaagaggcatctgacttacatgctaggcacacacaagagctctgcagtgttttaagtaagacagcacacagttcgattctttcttattttgcattttaattttttaactttttttttttctcttgagactgagtcttgctctgttgcccaggctggagtgcaatgacacaatctcggctcactgcaacctccgcctcctgggttcgagtgattctcctgcctcagcctcctgagtagctgggattacaggcaccaaccaccatgcctggctaatttttgtatttttagtagagacggggtttcaccatgttggtcaggctcgtctcaaagtcctgacctcatgatccggccacctcagcctcccaaagtgccgggattataggcataagccactgcacccatccaattttttaaaactttttaattcaaactaatgttaatcatataggaaagttacatatacggtacagggagttctcatatatccctcgctccacttctcctaacgtgaatgtcttattgtacgacgtcaagcacagcttgataatcaagaacaggaaattaactagacgatgaacttgatttgagtttcaccaatttttcacctgatttatgttccaggatcccatccaggatcccacgcggctggctggctctttttaaagcctacacagctctgggtggcgaatggctccggaggtgtcaggagtagaagcgggggctcactcctggccttttgctgtggtccaggcaaaagctggagtggccttaggtcaggttcatgatttaaggtctaggcagaaccgacaggatgtgaacaaagggaacaaggacacttcctgggttcctgggttctgccttcagtacgtggacggatgagtgagaccagaagaagtaaaagtttagggggcaaaatcaggagctcagttctggacctcccaagctgaagatgctggtgacacgctcaagcgatagggacaaggaggtggccataccatgaaatcagaagggagctcagggccagagatccactgtccataatatcaccagggagaagacagcaggtggggaggcctgggaagcagccttggagctgcaatgttttgaacggccagggaagtgggccagcagggctctgaggagggacaaaggggtagggaggggggctgggtgtgatggctaaagcctgtaatcccagcactttgagaggccgaggcgggtggatcacctgagctcaggagtttgagaccagcctggctaacatggtgaaacccccgtctctattaaaaaatatatatatacaaaaattagccaggcatggtggtgtatgactgtaatcccagctactcaggaggctgaggcaggagaattgccttgaacccgggaggtggaggttgcagtgagcggacattggtgccactgcactccagccagggcaacagagcaagactctgtctccaaaaaaaaaaaaaaagaagtggatcactgtgaacgctgcagagagaagatgaggccactagcaaagccagcctgggtttggccactggccacgcaaagactgtcagtgaccacaccagggagaggtgcgtttgggcggcgaagagcacaggccaggctggcaggttggtgtgcgagtgtgtgcaaggtggagaaggcacacgcggtcagtcctttggagaagtctggcacgaggcctgccgaggaaatggcccgggggtgtggcagggcggaggtcctgtgccatgtcctgcactgaccagggcagcccacgggaaggcagctgcagagaaggcagaacccgcagctccagaaggtttggggcatgaccagcagaggccaacttctattgtgaagaagaaaccgactcccagactttcagggaagggggtgtgtttggtctggtggcagtggggacagcaaagtaggacccttgggtgtggctacgattgagaggatgtcaggtagtgtgagattcaggctggtgtagaatcactcatgagaaagtatctaaaatcttccagatgacagtgctaccagctggacagctgacagtgggcgctggctctttcaaaacagtgctccaaaggcaaagaaatagcaaagacagaagtaaggcacttaactatttgttgggtgaatatagaaatgaatgaatgaatggatggatgagcagatacatcaagaagttaattcacaaattaaagcccattatgaaactaaagtagaggctgggcgcggtggatcacgcctataatcccagcactttgggaggtcaaggcaggtggatcacctgaggtcaggagtctgagaccagcgtaggcaacatggtgaaaccctgtctctactaaaaatacaaaaattagctgggcatggtggcgtcacctgtagtcccagctactcgggaggctgagacaggagaactacttgaacccgggaggcggacattgcagtgagctgagatcacgccattgcactccagcctgagccaacaacagcaagactccgtctcaaaaaaaaaaaaaaaaaaaaagttaatcctgcaatgaccatacacccagaaaccccaatcatggatatttaccctagagaaatcaaaccttatgtttacaaaaaacgctgtacgcaaatgtttgtagcggcactattcataattgccaaaacctggaaaccaacctaatgtccttcccaggatgaatggataaacacactgtggtccctccccacaatggggcactactcagcatcacaaggaatgaactagagacccatgcagcatccaggacgaatctcaatagctctagactaagtggaagaaaccagtcttcaaagggtacatgctgtgtggttccattttaatgacaggctcccaaaggcaaaactacagggaatggatagttgttgctgggtcggcaggggcctggaggcagggaacttaaggccgattcaccctgactttttagaactgaatcaaaaggaaaaccatacccaggtaacaaaaggatcagaggctactactccctttgcacctcgtggcagatgaaaaatggaaagtacctctgattggttccctcccgcaaccaaccagactggtcccaggccaggtcttcaggtgtaacgttgcaacttcacttcaacctctgattggtcgcctcctgcaaccaatcagactggtcacaggccactccttcacttacatagggtgtaaccaagtaaccaatggtaaacctctacagggtattaaggctccagaaaattctctaatcagccacttgctcctgctcgagcctgctcccactccgtggagtgtactttcatttcagtaaatctgtgcttcccttgcttcgttttctcgttgctttctttgtgcattttgtccaattctttgttcaaaatgccaagaatctggttaagaacccagacaacttgtagtcaagaccctccactggtaacacccataaagggtgtattagtctgttttcacactgttcataaagactttataattatccgagactgggtaattacgaaggaaaggtttaactggcttgcagttccccatggctagggaggcctcacaatcatggcagagggcaaggaggagcaagtcacgtcttccatgacggcagggaagagagagagtgtgtgcaggggaactcctctttataaaaccatcagatcaactggacgtggtggctcacgcctgtaatcccagcactgtgggaggccgaggtgggcatatcacctgagctcaagagttcgagaccagcctggccaacatggtgaaaccccatctctactagtaaaacaaaaattagctgggtgtggtggtccatgcctgtaatcccagctacttgggaggctgaggcaggagaatcgcttgaacccaggaggcagaggttgtggtgagccaagatcatgccattgcactccagcctgggtgacaagagcaaaattccgtttcaaaaaaaaaaaaaagaaaaaaaacccatcagatctcgtgagacttattcactatcacgagaacagcatgggaatgacctgcccccacgattcaattacctcccactgggtccctcccacaacatgtgggaattgtgggagtcacaattcaagatgagatttgggtggggacacagccaaatcatattaaaaggtcaacccttgggaaagatttttggggggtgattaaactgttctgtatcctgattgtactggtggctacaaaacctatacatgtgttatgatccttagaaccgtatagcaagagaaaaaagtcagttcacaaatgataattagcaaaataaaattatacgttaccatacaatcttgcaattccaatccaagcctctactcacgagaaatggaaacaactaagacttgcaagcgatgttcagagcagctctgtttattacagccaagacgtgggaataatccacgtgtccagcagctggtgaatggatggacacactgtgatatatccacaccaccgaatttaactcacgaaaaaggacctaaatacttgatctgtgctacaatacagaagaacctcaaaaacaataagctaattgagaagtcagctacaaaagactacaatagtgcatgattccaattatatgaaatgtctagaaaaagcaaatctatagacacagaaagtagatttgtggtttgggactggaagcaggtattgcctgaaaccagatatgatggacctcatgggatgatggaaatgttctaaaaccagatgataccctaaattttctaaaaataaaattgtatacttttcacagctgagcttcatagtgtgcaaatgataccttagtaaaactgtctttaataaaaagtgctcaattcgttatctattttctttttttcttttttttttctttgagatggagtcttgctctgtcacccaagctagagtgcagtggcgcgatctcggctcactgcaacctctgcctcccgggttcaagcaattctcctgcctcagtctcttgagtagctaggactacaggcacctgccactgcacgcggctaattttcgtatttttagtagagacggggtttcaccatcttggtcaggctggtctcgaactcctcacctcgtgatccaccctcctcggcctcccaaagtgctgggattacagacgtgagccactgcgcccggcctagctatatattttttaaagtaaaacttgatccctacctcatagtgtacacaaaaaatatcagttcacatttcacgtggattatagacataaatctgaaaagtgaaacaatagagtatctaggaaataatattatagtttcatgacctcagaagtagagaaataggacaaaaaaagtcctcacctaacaaagaaaaaaagtggatcaattttatggtaggctgaaccatatgccaattgccaatatttgaccatttcgatctacaaaaatggcaatttcgtagtaaaaaggcaaaactagagtgggagaaggtatttgcctcacatataactgacaaagggctggtagcctgaatataaagaactcctcaaaatcagtaagaggccaggcccgggggctcacacatgtaatctcagcactttaggaggccaaggttggtggaccacccgaggtcgggagttgaagagcagcctggccaacatggtgaaaccccatctctactaaaaatacaaaaattagctgggtgaggtggcacgtgcctgtaatcccagctactggggagactgaggcaaaagaatgttgaacccgggaggtggaggttgcaatgagccgagattgtgccactgcactccagcctgggcgacagagtgagactctgtctcaagacaatacaaaacaaaacaaaacaagcccaacaataagaaaacaaaaccagaccactcagtagaaaaatgtgtaagaaagctgaacaggcacttcactgaagagccaacccaggtggccagcagacatatgaaaagacactcagccagggaactgcaaatcaaatacagaatcacaaatgaaaattaccaaaagaaactgcacccacccaccagagtggctgcaattcaacagagtgacaagcgctggtgaggatgcagagccacccacaggaaccctcatactctgctgacgggtatgaggtgataacaatgttatcaccatttgttatcaccatttgtaaaacaagtcggtattaccgatggaagttgaagacactcacactctatggctcaataattccccttctagacattgatttcggccaaagaaatgcatgcaagtgtgcaccaggatacagtacgtaagtattcacagggattattgtaaaagtcaaagcccagaaacaacccatgtatccatcaagaggaggatcgatggatacgttgtgatatgaccgagaaggcacaacagcagtgacgatgaaggaaccccagcgtaagcaacaggcaacaggaatgaagctcacaaactttacactgagtgacagaggcagccacaaaagaatatatactgaccaggggcagtggctcaagtccgtaatcccagcactttgggaggcctaggcgggtggattacctgaggtcaggagtttgagaccaacctggccaacatggtgaaaccccgtctctactaaaaatacaaaaaatcagccaggcatggtggtgggtgcctgtagtcccagctcctcaggaagctgaggcaggagaatcacttgaacctgggaggtggaggttgcagtgagtcgaggtcatggcatcgcgctccagcctgggcaacaacagcaaaactcggtctcaaaaaaaaaaaaagaatacacactgcaggttccatttgtacgaaattcaaacacaggcaaacgcaatttatggtgccagaagtcaggacatggttacctttagaaggaggaagtgggtagcgttgggagggacacgagggaggcttctgggatattctgtttcatctgggtgctggtttagtggatgtgttccttttgtgataattcttcaaactgtacacttatgcattttatgtatgcatattacacttcaatgcaaaatttattttaagaaacaggaaaccaaactcttcaaaaatgccaatagcagtaaagaaaaaaaaatgtgcggaactgttctagatctagatcttgagtgtcctcttttaggaaaagatcatccctgattggatcctggatgaacaccataaaagctctaaaggatactgttagatgctggggaaatttgaacatgaactatatattttataagagtattctgtcaatgttatatttcttgagtaggataatttgttttgtctgtacaggagaatgtccttgttcataggagatacatgctgaagaatttaagggtgcagggccacaatgtctgcaatttagtcagttaacggttcaatggctcagcaaagaaaaaagaggacaaatatagatacacacacatacacatatgcacatacatatgtgtgtactgtattatatcccattcagggttcttgcacaaatgtgtgtataattatattcacacatacatatatacacacctacactgagacagccaaagaaatttggcaaaatgttaaccacgggtcaatcaggtgaagtgggatattagtgttcattatactattatttcaacttttctgtaggtttgaaatttatcaaaatgaaaagttgcgaaggccaggcacagtagctcacacctggaatcgcagcactttgggaggccgaggcgggtggattgtttgagcccaggagtttgagaccagcctgggtaacatggcgaaaccactggctaatacaaaaattaatcaggcatggtggtgcacacctgtagttccagttcctcagggggcagaggtgagaggatcatctgagcctgggaggtcgaggcagaggtgagccatcatcgtgccactacactccagcctgagtgacagactgagaccctgtctcaataaataaataaaattaattaattaaaattaaattaaaagttggagaaaaaagcaaaagcaagccaaaaaacagacaagccaaacacccgacgccaagtgttgaaggactcacagttggataagaaaaccaaaaagtccgggcgcagtggctcacacctccccagcactttgggaggccgagccgggcagatcacagggtcaggagttcgagaccagcctggccaacatggtgaaaccccatctctactaaaaatacaaaaattagccaggcatggtggcccgtgcctgtaatcccagctactcgggaggctgaggcaatagaattgcttgaacccagcaggtggaggttgtggtgagcagagatggcaccactgcactccagcctgggcaacagagcaagactccatctcaaaaaaaaaaagaaagaacgaaagaaagaaaaccaagaagagcagagacgggaccaccaggaatggcaagatctggccccctgcggcaggtggagggcaggacggctgctgggtggctggctgtgctctcctgcaacctgcctggtagatatgcaaaggcggtcaccttataacaatcagattgtacatttattttacgtggtcttccatctatatcacacaatttttttttttttttgagatggagttttgctcttgttgcccaggctggagtgcaatggtgagatctcggctcactgcaacctctgcctccctggttcaagagattctcgtgcctcagcctcccatgtagctgggattacaggtgcccaccaccatgcccggctaattttttgtatttttagtacaggtgaggtttcaccatgttggccaggctggtcttgaactcctgacctcaagtgatccacctgccttggcttcccaaagtgctcggattacaggcatgagccaccgtgcccagcctgtatcatatacttttttaaaaagagactttacagaaaaacagactgagcaaacagagctgcatgccggtgcatgagcaacaagttataatcgcacgctggaggaagaaagaggaagccgtcggccacacagctccgctctgccaaggctctgctgccgtccctcacccgccccaccacgtggcaacccaatcacaacaatgccgccgtcccccagctgctaaatgctctcaccatttggttgctgtgcaaacacacctaacttagacttcagactgatgtcctggaggtgctacaagatggccattctttatgagtaaggctgccttccagggtaaaaattatgattttcccataaatcacatataagcacttagcaaaaaatatttaaaactctcataagttttggtcctaaattcttttctcttgctgttactacaaaaatgacagagacaaaaaatttattatttataacggcttggaatctaattccaaatgagttgcttccgtagattcacgtaatactgcagaactaaatatgcaagattcccgattccaaatggaggccaaattccatccacacaggagacagaggaaccctcagcagtctctccttgaagtaattttttttttttttttttttgagacggagtcttgctctgtcgccaggccagagtgcagtggtgtaatcttggctcactgcaacttccaccaccgaggttcaagcgactcccctgcctcagcctcctgagtagctgggactacagacgctaattttttatgatttagtagagatagggtttcaccatggtggccaggatggtctcaatctcctgaccttgtgatccacccgcctcggcctcccaaagtgctgggattacaggcatgagccttgacaagctgacaacagttatctatgttcttcgtcagttcatggactcgacaccaaaatgcctgggttcagatcccaattcctgtgaaggcttaagcaattacttaacctctttgtgcctcagtttctgagtctgacagattatggcaacatcagtgactttacagggttttgaggattaaatgagtaaatactctaaagggctcagatctgtgcctggcacatattagcaccgatgctggcctgttcaaaaattctattattatttgctcaacaattgcctgaaaacatagaaaaactgtctgccacatacgcagatgaggggaacaacgaaagatttggtgggtttcagaagaggtacaggcctgatggctgccgtgcgccaacaaggtgagcctgcagatcagagaccacgtgcatgagccacagtgcatgtggctgctgtgtcccctctgccttctcggtcttacacaaatggtctcttgtggctcaagttacatacagagctccaacttagccaaggtgacgcaaaacgaactcactacacgtaccccttgtcaacttggtgtccatatctactcctcttttcaaccgtacttaacttccaaatcaagtaaatagcaactaggcttccatgccatataatgctactatccgtcttacaaccaaaaccatgctaaccctctccccagaagaggagccaaagtccttttatgaactttttttgagacaaggtctcactctgtcacccaggctggagtgcactggtacgatttcggctcactgcaacctccgcctcccaggttcaagagtttctcctgcctcagcctcctgagtagctgggattacaggcacctgccaccaggcccagctaatttttgtattattagtaggggtttattagatggggtttcaccatattggccaggctggtgtcaaactcctgacctcaagtgatctgcctacctcagcctcccaaagcgctgggattacaggcatgagccactgcacctggcccaaagtccttttacattctatctgagtggttatccgttggcaccccatggaatgaagaaggagactgaagtgataacataaggctggtagctgacagacccctgaagtgtaactatgaaggcgggctgtggaccttgccggctggaagcaagacccttctggtcatctttactaccaggtagagaaggagaagacactcaccgcataccaggtaccaggaaatgtgttgatttgttccagcaacaaaaacacatctggcacagcagctgtaactgcagtcaccgcctagtttaagtttatgacaacctgctgtcattctctaagatccatccgtcttctagacaagccaaatatggattaaacggagatgtgacacgatcaccacccttgcatctttcaagtccctgatggtggcactaatctctgccatcctcccaggaatgtgataattgctttgggttgactattttggtagacagaggcagttctggcagcttccacttggcctttgctaccacaacagccctcactccagggaaccagtgtcagaattctgccaggtgctaagtagatatatatttacttatgcattgcagaactgcagaaagaaccacaggacagctattatatcttaataattacttaatatataatacacaatgatatgtgggtattaaatattatgagtcattactctgaaatggattaaagttaatataagtgtaattgccatacagagtgattatgggtgcccactcaaaagtcagccatactcaattatacacaaaaacacaaaacacacgtgcacacatgcttagattgcctcgcaaagcctatatgcatgggaagccaatgacacacacgaggaaagatgggaacacagagctgcttcttggtttcagggaatcctcacttctttcttccttctcagggaaatttcgctttgtttcatgctcgacctccagcctcccaggtcttggccttaaagattccaagggggccgggcacggtggctcacacctggaatcccagcactttgggatgccgaggcaggcggatcacctgaggtcgggagttttgagaccagcctgaccaacatggaaaaaccccgtctctactaaaaatacaaaattagacaggcgtggtggcacatgattgtaatcccagctacttgggaggctgagggtggagaatcacttgaacccggaaggcggaggttgtggtgagcccaaatcgtgccattgcactccagcctgggcaaatgagtgaaactccatctcaaaaaaaaaaaaaaaaaaaaaaaaaaagattccaaggggccccagcccccctcccttcactaaagacaagccagctccttagatcccatgatgccagagctgtgatcttccagtacactggagaagctccttgtatcttcctatctcctagtaggctgatttcatccaccaacagccacagcaccttgaagcaacccaggagctgctgtttcccgtgatcatgtggtcaaccctggtccttcaaacttctttcagaactcacacacacaccacgtccccttatgagttttgagcagaatgctttttctttgaaagtctgtattcaacaccccctttttatttatacaaacttggagggtatgtgagaaattttatggcatgtatataatgcgcagtgatgaagtcagggcattcagggtgcccatcactcaaatacaatacattttggttttggggtttgtttgttttttttttttttttttttgagacaatctcgctctgtcacccaggctggagtgcagtggtgcaatctcggctcactgcaacctccgcctcccaggttcaagcaattctcctgcctcagcctccagagtagctgggattacaggcacccaccaaccacccggctaatttttgtatttttagtagagaaagggtttcgccatgttggccaggctggtctcgaactcctgacctcaggtgatctgcctgtcttggcctcccaaagtgctgggattataggcgggagccaccatgcccagccacaatacattttttgttaggtgagaatatatataatattagaataatattactctgctctcaagccttgaacttattccttctacgttactgcatgatggtaccctttaaccgacttctcttgacccttctcctccccgccactcacccttcccagcctctgttacccttcttgccactctctacctccatgtgatcaaaccttttagctcccacatataagaacatgcaatatgtcttttgtgtctggcttccttcacttaatgacttccaagctgggcatggtggctcatgcctgtaactccagaacttcgagaggccaaggtgggacaatcgcttgagccccaggagttcaagaccagcctgggcaacatagtgagaccccatgtctacaaaaaataaacaaaattagacaggcatggtggtacatgcctgtggtcccaactactcgtgtggctgaggtgggaggatcatttgagcccaggaggtcaaggctgcagtgagctatgattgtgccactgcactctaacctgggcaacagagcaagactcttctctaaaaaataaaaataaaaaataatcataataataatgaccttcagttccatccatgttattgtaaataacagggttttgttccccttgatggctggacagtatcccactgcatatacatataccacagtttctttacccatccattcgatgatggccacattgattccatacctttgctattgccaacattgctgtgatgaacatacaagtgcaggtatccctttgatagatcgatttcttttcctctgggtagatatctagtagtgggattaataatagccattgtgcccagtaagaccccacttcttaatattattctcatataattctaatagccattctgactggcataaggtgatatttccttctggttttgatttgcatttctctgtgatgagtgatgctgagcattttttattgtaatgctcttgactaactgtgccacgtttacaactgtctttgagcggagacctgtactacagagtcctacacagggttaaggaggagcatcagaaggcagtgaacagacgtgaggcctatcagctggtactagaaaagagacaatccatttaaggctttgactcatttttgaaacctatgtgctatggtctaaatgtcccccaaaattgacgtgtttaaacttcatcacgaagggatggtattaagtggggtcttactggcacagtggctcaacacctgtaatcccaacagtttgggaggctgaggtggaagaatcacttgagtccaggagtccaagaccagcctaggcaacacagcgaagactccgtctctacaaaaacaaaattgtttttaatgagccagacgtggtggcacacgcctgtggtctcagctacaagggaggctgaggtggggggatcgcctgagcccaggaggtccaggctgcagtgagccgtgattgcacccctgcactccagcttgggcgacagagtacgattctgtctcaaaaaaaaaaaaaaaggcagtggggtctttaggaggtaaggaagaagtcatgagtgctccaccttctcaaatgggatgaagaccctaatacgagagggcttaggggtgagcaaccgcatgaaaggcctgagggaacgagtccgtagcctttgctcttctgtcatgtgaggacatggcaccagacacccaatgccaaggcctcgatcctggacttctcggcctccagaactgcctccagaactgtaagaaataaatttctattgtttggaaatcacccagttgcaggtattttgttgcagcagtaaaacggactgagataccgtgtcgctgtacactctttgcagtatgaagtcagcatggtttcagttgagaaaagaggaacagagtagttgggtctcatcctcacaaccctgtttctctcctctcttctctcggggtcatcactccccaaccatccaaaccagaagcctccaggtcactttcttctccttcctttccctcaccatcaagccctgccaagtctcgctgtggaatccactactttccttccactcccactgcctgaaccctgaatgtctctcgggccccagcaaagagcttccaaaccattctccaggcttccagtttctcctcttccaattcatcctccattatattatcaccccataagccttgctctgaaactcgtaatgcttgcccttttataaaaataatagcaacaacatctcctacaactaagatttagagaatacggattatgtgtcaaacactgttctaagcaccttacacgcattaccctcacagttaacccgcaccagtctgtgaataggtactactacaaactcctgctaacagaacagagcagagactctaacgtggcatgcaaagtctttcactaccaggccccaagcccctttccacccccatctcccatgtcctccatctttgccgcttccccacgtacttgcggtgctgtttctcaaacacccacccctttctgtgttacacgccctcatgccgtttccttgccattttaggtgttctgctactgttttaattcttgtctttttaagtgttccaacgacactttaaaaatgctttaaatgcaggattgcaggccaggtgcggtggctcacgcctgtaatcccagcactttgggaggctgaggcaggcagatgttctgaggtcaggagttcgaggccagcctgaccaataagatgaaactccatctctactaaaaatacaaaaattagccaggcacggtggcatgtatctgtaatctcaactactcgggacgctgagataggagaatcacttgaacctgggaggcagaggttgcagtgagccgagatcgcaccatttcattccagcctgggcaacaagagtgaaactctgtctcaaaaaaaaaaaaaaaaaaaaaagcaggattgcacccttgaaagttaaaattttacttttgctgaaaggaacaattgaggtcaggtgcagggactcacgcctgtaatcccagccctttgggaggtcgaggcaggcggatcgtttgagctcgggtgttcaagaccagcctgggtaacatagtgagatcccatctctacgaaaaatgcaaaaattagctgggcatgatggtgcacacctgtagtcccagctacttgggaggctgaagtgggaggatcacctgagcccaggaggtaggggctgcggtgacccatgattgcaccactgcactccaggctgggtggcagagcaaaaccctgtctcaaatccaaaagaaaagaaaacaagagaagagaagagaagaccattgagcttaacacgccttttcatataaataactccaatggcggcattcatctaggctaaaattttggtttctgagaacaaatcattttgctaataattcagtggacatttatactcaaagataggcagagcccctaaatctgcaggtgcatgaaaaattcaggtgtagggacattacactacacaattacctcagactagggtagtttgttgcggtgaggttgggtttttctttccttccttttaaatttttacttaatcaagaaagcttcttttaagacaaacacttggtgaggtggccaagcactatcatatttcctggtttcctcttcttctttacttaacaaagaactgctcattaaaatgacatcttcttaattttttttttttttttgagatagagtctcgctctgtcacccaagctagagtgcagtggcgcaatctcggctcactgcaatctccacctcctgggttcatgcgatcctcccacttcggcctcccgagtagctaggattacaggcagccgccaccacacctggttaatttttgtatttttagtagagacgagatttcaccatgttggccagactggtctcgaactcctgacctcaggtgatccacccgccttggcctcccacagtgctggtattataggagtaatgacatctttaaactcacatctaaggagtgtctactgagtataagacattgattccaggttaaataaagtatctacacgagtcttttcacctattgactgaactgtctttaataatcacacttgtgtagtacttttcatttccattacctcatttgattttccaacgagacaggtgaaacaattctgcttccagtagacatgggagggtggaaacagcagggccactacttacctgtagtagtcagttttaagttgaaggtaaataccccttcaaaatttctggatggaaaagaccacaggagataaagcagagaatcaaagcccagggaggaaaatcatataggggacattaaagaccagcagggtcataagacttcccaagaaatggcatattctagaaatagagcaaggaagccactccacactcatccttctctgaatttctacccttattttttccttctaaagagctagacttgggctgggcatggtggctcacgcctgtaatcccagcactgtgggaggccaaggcaggtggatcacctgaggtcaggagtttgagaccagcctggccaatatggtgacacctccgtctctactaaaaacacaaaatgtagctgggcgtagtggtttacgcctgtcatcccagctacttgggagcctgaagcaggaggatcacttaaacccaggaggcagaagttgcagtgagctgagatcactgggcgatcgagcaagggcgacaaagcaaggccccgtattaaaaccaaaaaaaaaaaaaaaaaaaaaagaggctctttctaaacttttaaatctattgctaaattcaaggaagacttgattgcagtagcatttaactctggaatcacaaataaagtactagcaaattccatcttcatatactactgctttaatgccaagctaatacttaaaaaagaaaatgggcaaagaaaaagaaaaagttgatgattcatgagtctaaacaattttttgtttttatttatctgattttttttgttttttttttttttgagacaaggtttcaccgtgttgcccatgctggagtacggtggagtaatcacagctcactaaagcctcgatcacctgggcccaagccatcttcccacctcggcctcccaagtagctgggacctcagggatgtgccactgcccccagctaagttttttttttttttttttttttgagacggagtcttgctctgtcgcccaggctgaagtgtactggtgtgatttcgactcactgcaacctctgcctcccgggttcaagcagatctcctgcctcatcctcctgagtagctgggactacaggcgtccgccaccactcctggctaatttttgtttttttagcagagacgggggtttcaccatgttggccaggctggtctcaaactcctgaccttatgatccatccacctcagcctccgaaagtgctgggattacaagcgtgagccacggcgcccagctgactcagctgtttttaaattcttttgtagagacagggttttcctatgttgcacaggctggtctcaaactcttgggcttaagcaattctcccgcttggcctctcaaagtgctgggattacatgtgaaccagcatgtctggccttcaattcatttctaaaaagagaggaaaaatatatggcttcttccccgccccattgttatttgattcaattatttacaaaatgaattcttaggatattttgcatttttatttccttctgaaaaatcagtttttacaccatgaccttaatctagctaattctgttaaaataggatttaattttagataagttcccagaggacctgcattccattcaattgttggttgaactatatttcctagtgactaggatttataaatattaattatctgaaagagtggaaatgaacatatagttatttttagaatatactgtgataacaacaacaaaaaatcctgcaaaacggagctagaccagcgctgacatgaaaatccaacagccacctggcgaactctgtgttccaagaggtttttatttacagtgtaggatgtgactttacctataaaatgctttctggctgccactccgtttggacgattccggttttggtctgctaacttatcaactgtatgatttgggcaagttcctaaacttctctgtgcttcgtttctcccctttgtaaaacaggactaaaaatattaaaactcggccgggcgcagtggctcacgcctgtaatcccagcactttgggaggccgaggcgggcagatcacgaggtcaggagatcgagaccatcctgactaacatgctgaaacctcatctctactaaaaatacaaaaaattagccgggcgtggtggcgggcgactgaagtcccagctacttgggaggctgaggcaggagaatggcgtgaacccgggaggcggagcttgcagtgagcccagatggcgccactgcactccagcctgggcgacagagcaagactctgtctcaaaaacaaacaaacaaaaaattaaaactcttccctgtggggttgctttaaaaatcgtataatgtgttatatgtaaacataaagcattataacaagacagaggaatacaccactggagcaaaatcagaagcggttccctcgttttttcacaatgtggagtctggcccggcgcggtggctcacacctataatcccagcactttgggaagccgaggcaggaggatcacttgaggtcaggagttcgagaccagcctggccaacatggtgaaaccccatctctactaaaaatacaaaaattagccaggcatggtggcacgtgcctgtaatctcagctgcccgtaatctcatctacttgggaggccgaggcaggagactcacttgaacatgagaggcagaggttgcagtgaaccaagattccgccactgcattccaacctgagcaacagagcaagactacatctcaaaaataataataataaacaatgtggagtcttttattctttgcctagaattttctgtgcattgctggaatgagtatatccagaattcattccaaagttaattaagaaaagtacagttaggctttggtaaaacagtctgccaaaatttaacaaaaaagagaaggagaagaaaagttcattaaaaaataacatcactaggaactctgcaaccttgagtggggcacttaagtgccacagacctcagtttcttccttttttgttgtttttttatttttgttttctaggcagacattgaatgctagtttcttcctttttaaaaaaatgaaatagcttaactagaaccatctaaactacaaagaatctttttaaaattctaggccaggcacggtggctcatgcctgtaatcccagcactttgggagacccaggtgggcggatcacctgagatcaggagttcgacaccagtctagccaacatggtgcaaccccatctctactaaaaatacaaaaattagccaggtgtggtggtgtgtgcctgtaatcccagctactccggaggctgaagcaggagaatcgcttgaacccaggaggcggaggttgcagtgggctgagatcgcaccactgcactccatcctgagcaacagagtgagactccatctcaaaaaaaacaaaaaaacaaaaaaacaaaaaaaaaattctaaaacactaggtttatgaagtaaataataaaattctgtgataggacggagccattttcttccaggctatttaccaaacacagcaaaggaaatcaaaaaaaggcttcccatatagtaaaacttacattttggagatctggatttctccattataaacctatggaatcaaatcatttaaaatctagttaccagagaaacctcggtttaatattaacaaacatacttcctttaaccacgagccactttaatgtatatcagttttatctctggagcttcatagatcccaacagagaaggctgatctattttcagagaaacatagcaagagagtgtcacttctgaaccattatacatttaaacaatctctctacatgtagagcctgcatctaaatcccagcaatttttcaggacctagctctgaggccacatcagcactccaggcaggcggagggactctccaccccgcctcttttgcccccagaaaataaatctttccccagaccaacaatccacttcccggcctcacagcaacgggctcccggctcccgcacgtgactgccaactctttacgagatgaggctgtgctggctcggtatggttgataagacaagcatgcaagaaatatttattaatgcaaactcgtataaattcgtatcatctgagtttatgggaatgaggataaatcacaaaagcattataaagtgaggctttggacaaagtcctgaatggaagagtctagtaccatttttagagcctcttttgttttttaaactccttttactatcattcccagccttggtagacacttgacaaatatttgaggggaagctgaggacaaagagatgaaaataaagtgactgctatgaaaaaatgaaagcccaggtaacaataaacagtttaatctctgtttagttaggaaggagccaaacgcggctgggcacggtggttcacgcctgtaatcccagcactttcagaggccaagacgggcagatcacaaggtcaggagttcgcgaccagcctgactaacatggtgaaaccctgtctctactaaaaatacaaaaattagccaggtgtggtggcgtgtacctgtaatcccagctactcaggaggctgaggcaggagaattgcttgaatccaggaggctgaggttgcagtgagctgagatcggaccactgcactccagcctgggcaacagagcaagactctgccttaaaaaaaaaaaaaaaaaaaaaaaaagagccaaataattttgcctcccaatttgctgcatccatccaagaggggaagatggtctcaggcagtaactagctttgaaaacccttgtgaattttttgagatagggtctcactctgttgcccaggctgcagtacagtggcgcgatcttggctcactgcagcctcgacctccttggctcaagtgatcctttcacctcagccgcccgagtagctgggactacagacatgcaccaccatgctttttttctttctttttttttttttttttttttgtagagatgaggtttcatcatgttgcccaggctggtcttgaactcctaggctcaagcgatcctcccatttcagcctccccagtagctgggactacagttgcataccaccacacctggctaaactttttttcatattttttgtagagttgggggtcttcctatgtttcccgggctggcctccaaatcctgggctcaagtgatactcctgcctcggcctcccaaagtgctgggatcacaggtgtgagccacggcaccaggtctgaatttgtgattcgtgttaatgacgaacctgagctgagccttaagtatctgtccggagtcgcagaagcaatcagcacagtgcccagcactgaaccacggcacacagtgcccagcactgaaccacaacacccagtgcccagcactgaaccatagcacatgcgcattccccccacgcccccgaacttatattcgtcaccatatgttgtgcagatccacgaatgggcagagtcacaattctcacatgagctttgtaaataaggaaaaactgcatgggccagcacacgttgcttgtgtgtgtgtgtcctaagcactgatgacaaatgcagaaccaacaacattcccactcatccagaggaaatcgtgagttctcaatgagcaggctgggagtagcttagtagtcatttccaaagcactgtgaaacttgtctacttcatgaaaaagtactgaggctgttttacagccctttaacttaaatctagtaattgtgcctatcagagttctgaagaaaataagactcaataatctaagctactagttcacgcagatcatcttaaagcaagattttccacagacctcacatatcgaggtgacatgatccttttctaaaatgaaagagcttcgctagagcccagaagttcgagaccagcctgggcaacataagtgagaccccgtctcaacaaaacaacaaaaaaaaagttttttttttaaattatccaagtgtgctggcatgcacctgcagtcccagctacttgggaggctgaggtaggaggactgactgagctctggaggtcgaggctgcagtaagctataagtacgccactggactccagcctggtcaacagagcaagacccaatctaaaacaaaaaacaaaaaactacgaaaacatattccacaaaaaagatttgtacataaggactgtatataagattgtttctaggcagacattgaatgctaatttcttcgttttttaaaaaaaatgaaatagcttaactataaccatctaaactacaaagtatcttttttaagttctaaaatattaggatttataaagtaaataaaattctatgacagcatggagccattttcatccaggatgtttggacacccttctcctttttttgagactccatcaaagaaagaaagaaaagagagaaaggaagagataaaaagaaagagagagctagcttagcaaaaatcatctaaactacaaattatcttaattctaaaatattagaatttataaagtaaataaaattctgtgatgtggtttctctagttaagggcctgggggacttacacagctgttacgaagacattatttaaaaaaatcttcagttctccctggggggcaattggattgacaattgcaattcctttgtaaccaatgggcttctgtgtgagctgttagacgcacactggtattcgttcaagatggaaaaccaaacaacatggacacaacccatgacagccttcaaagttctgtctgcatgaccaatcaggtcctttggttgaaatccatgaccaatcaggtcctttggttgaaatccatgaccaatcaggtccttcggttgaaatctatgaccaagcaggtccttggttgaaatccacgttggccaggctgatctcgaactcctgacctcaggtgatccgcccgcctcggcctcccaaagtgctgggattacaggcgtgagccaccgcatccggccagagtgtgttgttttctcattgcagtccctaacttgccctgaaccctcccttacccaggtagccacgaagcatctggtgactgaggcctgggagtgagccctggaggttctggctgacgctctgccgtgacccacttggggcttctgtgacgtccccttcagcctgacaagaggacccagttctcctctgtgctcaccctgaacaaaacaggtcctagtctgggaagggcgccaaagagagatcttttcactggtttctgttccctgtcatttttgggggagggtgggctggggaacacaaacacccaataattggaaattgtcagacatacaaaaaagaaatgtaattagtcataaaccctattttaaggttatatttgcactgccattttaaaatgagaaaacactaataacattaaaatgaagtctttgttaaaagtaaccatgcattgttcaaatttccatttgttctttgtttgacaatgaaaaatcattctaaattagttccatacacttactgtgaaacacaacagtttattcctgggtcacattctcccccttctgtggtttatataacttctctttgttccgcaaatggcagtacaatggcaaacaaaataaaatggagtttattatgaaaatggatccattaagctacctaagaataacatagccctacaactcctgcacttgtagagggacacgggtgagatgaaacggacgtcagtacccctgcaagaatcacacagataggcccctcggtgcacctggagagggaggccacaatggcaaataataggagacacagcgatgccccactcccttctttcccaagagctgccatttctgcccttgctggataagctcagtgtctcacacagcgtgagcgtccactagatgctggcttggacaggcgatgctgagggttcccatagacggcactctagtagggctgctcaagtccctcctcacaatccagaggatctcacctaggcagggcccatggtcactccccaggagaagagccaggaatgtccccatcaagcaaaacccctggtctccagctcacaactcaaaacccaagcaaatgaaggaaaagctcctgggaccatcaggactcataacgaccaagggtcagtcatggtatcaggaaatcgtaatcctggctcagaaaggttttaaatacagggaagcagaaggctggggcagcaaaggacactactaagagcaagcgactcacagggctcacccggaaggcattacaaactggaattcctaaaagagtggttgccaagctcacccagaagaggaggtcccactggtccctgagtctgctccaaacggccacgcacagcgtgggcatcctctcccctgctttccattgctgtacagaacctgacctgggaccagagagaagagggtccagggaaatgctgctgaaggcttcgtctctgcagtggagagaaagtcggaaggggcagcacccacccctagctgcccatagatgaccaggcacaggcacccaccaccgacactggcacaatcccccaacatgttctcagaccagaccaagaccctagccgagcccaaggatgctggctaatcaaatagtaaacacctttggccagattatccttaaaaagtctctggaatgtcaccttcagtctctgtagtctactttctaacatacttctgagccgaaaccacgtgaaaagatttttcttctgactacaaggcagaacaataaaagtgaccctctgagtcaaaaacaccacatgaaactcacctcccgcctccaacccatcccttccgcatccttcatgtccaccgtccctttaccaacaaccagctgattcttccagacttcaaaatctttcagattaacccagaaatatcgataagggaggcctttttcttagcttatgttgtatatgtttttctgtttaggctactgctataaagaactatccaccagcctgggcaacaaggtaagaccgaccctgtttctacaaaaaatacaaaagtagacgggcatgatggtgtacacctgtagtccctgctactcaggaagctagggtgggaggactgcttgaacccaggagttagtggctgcagtgagccgagatcacaccactatactccagcctgggtgacagagtgagactgtgtctcaaaaaaaaaaaaagaactatcccgagagtccactgttgggggccgaagtgggggtggggacccttggctgccatgttcctgggccaggaacatggactggatggcctgcatgtcagaagactggtgacatacaagggtcaataaataaaaacagttaatatgataagagctgttactgttattgttagaaaagaggggcacagccaaggaaaggggagaaagctgaaacaaaccatttgacttggatggtatcatgatttttatatgagatgaatggatacatagatacgagcgggacagatggatacaaagaactacaaacgcatgtgtgcccgtgtgtgtatgtacaaacatatgtgtacgtgtagggaagtacatgcatatgtttaatttcctagctatgccaggcgcggtggctcatgcctgtaatcccagcactctgggaagccaagatggatgggtcacctgaggtcaggagtttgagacccagcctgaccaacatggtgaaaccccgtctctactaaaaatacaaaattagccggacgtggtggcgcatgcctgtaatcccagctactagggaggctgaggcaggagaactgcttgaaccgggaggcagaggttgcggtgagccaagttcctgccactgcatgccagtcttggcaacaagagtgaaactccgtctcaaaaaaaaaaaaaaaaaaaaaaaattcctaactacgctgcttgagaagtccttgtagccgtaatagcccagtagcgtgaacacacctaatacttagatcctggtttctaaaaaccactttctactaaaaggaaccagggcttattggagaaatggctgattccagggctggagcaaggaaagttccgggtgagcctagaaccaagaactaaacatgtggccgggagcagtggctcacacctgtcatcccagcactttgggaggacgaggcaggcagatcacctgaggttacaagttggagatcagcctggccaacatggtgaaaccccatctctactaaatatacaaaaattagctgggtgtggtggcgcacgcctgtaatcccagctacatgggaggctgaggcaggagaattgcatggacccaggaggcagaggtttcagtgagccatgatcacgccattgcactccagccggggcaacagagtgagattccatctcaaaaaaaacaaaaacaaaaacgaaaaaacctggccaggcatggtggctctcacctgtaatcccaacactttgggaggctgaggcaggcagatcacgaggtcaggggattgagaccatcctggttaacacagtgaaaccccgtctctactaaaaatacaaaaattagccgggcgtggtggcgggcgcctgtagtcccagctactcgggagactgaggcgggagaatggcgtgaacccgggaggcggagcttgcaatgagcagagatcacgccactgaactcccacctgggcaacagagcaagactccatctaaaaaaaaaaaaaaaagaagaagaagtaaagatgtgctcaaagaatgacatgaacacatcaaaagaacacaggggccagcttggaggcgctgcttttggccaaatctgggacaatctgggtatcgaagcaaatgataatggtaatgaattataacccaatgggtaaaataggagtctatgagtgtattgataggaaggagagaaagacagcaggcaagctccagcttgcagtggaatgccaactaatcaatgcaaaagaaacaatgcaactagaaacatcaccatttggcaatgctcatactaattccctcaggcaagaatcatcccaggatgctaaaacaaatgggcaaaaagcttaatgagaaacaggatattttccgagtccccaaaaaatctccccaccagaaacagtactttttaactgataattacaaaataccaacaaattaattttacagtggagaaacctggtagacaccacctcaaccaaatgataagttaacttctccagaaatgggactgatcagacctgtgtgcgttcctgtcgtgacaaccctgcagggactctcctgccaggaacctaccacctgattctcatcatgaaggaatatgagaccagcccaaaccgagggacattctacaaagtaactggcctgttctcttaaaaaaatgtcaaggtcgtgaaagacagagacgaaggaacagccccagattgaaggagactcgagagccattgacacagacggcgcctgtggtcctgggcgggctccggggcctctgcatttggtggcatggtgtgacagtgcccacgtcctgatttgggcaggtcggtgcaggctatccgggacagcgtccttgtttttaggaaacccacacaggagaatctagaggcactctctgcagtctattctcaaattattccggaaaaaagggatgtgtgtatgtggagagacagacagacaaacatgtcggaatgttaattcagggaatctgggtgaagagtatttgggaattctttatactgtttgggagcatctctgtaaatttaaacttacttcaaaattagaatataacgccaccaaaaccccctctatcactcactccgcattcctagataacaactagtgtggaattctgttctttgaatcactagatatcaactagcgtgtaactctgttgtttgaagccacctggtttgaggtactttggtacagtagccctaggaaataaatatgctactcaaagaatattgaatgtggctttttctacaatactaaaatctgacctaccatgttaacttagtaaggcaaactgctggggcggggtcccgtttcagccgaacgcatctgacaatgccttaagtcacacattgcataatcacaagttgcttcttgacatgagcggctcttcaagtgcacggggaacaacagattctttgtcagggactcacaagagtcacatgctgttattcttttctccttaagagacaaactgattttttaatcactgagagcctattacatgcgtggcatagttttaagatgttttgacatgtcacacgtaaacgatagtaaacatgtcttggaagaggggctaagatgtgggacgaacgtgattattcaatgggcatgcgcttccggccacgcatcacacgcacatacaccagcgcggttatccataactctaccatttcaagtgagccgcaagagactgtaaatcgcagtgaagtgggccgtcaggcaatgattactaaataagcatgggaaacatctaagattaacagtgaagagagaagatgcgtttggaatggaatcctggagacagttaagttaccaggtgctttcacagtcgttttttcaaattcagtcactgagacataaaataatattgatctttgagaagagctctcgacggaaacagcagttggcagtgtccccagagcacttgcccttcctctggagcgcttcacgtgcgagcccgccgtctatttataacagttgggcacttgtcgccacaatggctgattgtgtggcccagctgtctgtgtctatcaagaagggcaggagtggacagcctgcactttgatgtttcccttttttggagactgaaaataacatttttaaaaaactgccaaccggcaaggtcacaaaatatttttggatggcacggggacccgattgcaaagctgtggttcacatcagatgcggaggcctgggaagaagccagtgagccccattgcacaatatcctgctcatgccaacttcaaaagttatttgcctcggagagctcccagacgactctttctcggtaataaaacacagcattttagaaatttgcaagggtcttctggatagggcattacccagaggagcaaggatttccctggccactctggttacagttgcaaccagcagccccaggcctcttgccacccttgccccgccccaccccacatccctcacccccactccacaaactcctgcccttccctgatgagctctcaagcacttaccagcgacacgctacatatttttctaatgcatgtgtcaatttcttgactcgcccattctattatagatggctcacgaaagcaggattagcgtctgttttgttcactgatgcaaccacagagccgagaatagtgcctggctcacaatatttactgagtgcatacttgtggaattaattaatttaaatagcagagacaatgggatcaggaaacacatggaaataccgatgaccagtattagatgtcagggttctgtcgcccttccctccgcccccgacgaagatcccagctttgtttacatatttgtggtgcacaaaaatagaaatggactaaacaaaattcccgattttcccaaactgtggtggattgcagaaaccaagacttcgcagggctcggttctgaaatgattttcactcaaaccatcttcctgaaactcttcctattactctctgcccatttcgcaaaccttcttgctggaggtattagatacgggaagcacctgtagtaatcaacaagtatggctctgattaaatggatttttttctttttttttttttgagacggactctcgctctgtcacccaggctggagtgcagtggcacaatctcggctcactgcaagctacgcctcccgggttcaagcaattctcctgcttcagcctcccgagtagctgggactacaggtgcccgccaccatgcccggctaattttgtattgttagtagagacgggtttcactgtgttagccaggatggtctaaatctcctgacctcgtgatccacctgcctcgacctcccaaagtgctgggattacaggtgtgagccactgtgcccagccgaaatggatattttgaaaatcatcaagttatacaaaagaatcccacatgctgtacaacaccactcgagattttagggtttttgcgggttttacatcagtagatcatgaaaccctgactctttaattattatgtaaatgaaattcaacaacacactcacacctcaaaaactctggaaggtcagaaagaggcagagagcagggcccccgcggaaggggaggcacacaaggcagacagaggcagaggaggtgggagtacaggccccagcactgtggtagccaacagcagagccattcttccacaccgggaagggcccccaggcctcaggaagccagctctattcagcagatttcacaagtgaaaaagcctttttagatgtcttttggggtcaggcgtggtggcttacacctgtaatcccagtactttgggaggctgaggcgagcagatcacttgaggtcaggagttcaagaccaacctggccaacatggtgaaaccctgtctctactaaacatacaaaaaattagctgggcatagtggcacacacctataatcccagctactcgggaggctgagacaggagaattgcttgaacccaggaggtagaggttgcagtgagtcaagatcaggccattgtactccagcctgggcagcagagcaagactctgtctcaaaaaggaaaaaaaaaaaggccagacgcggtggctcacacctacaatcccagcactttgggaggccggggtggggggatcacgaggtcaggagatcgagaccatcccggctaacacggtgaaaccccgtctctactaaaaatacaaaaaaattagccaggcgtggcgccgggcgcctgtagtcccagctacttgggaggctgaggcaggagaacggcatgaacccagaaggcagagcttgcagtgagccgagatggtgccactgcactccagcgtgggcgacagagcgaggatccgtttcaaaaaaaaaaaaagataccttttgggaacaattccccagcagaacaaaggtgccacttctaagtatgaggaattccttatcaaagatgcctgagcctgcaagacagctcccacaagtacaagcgctgcaacgactgggtgactgcgcgtctctggcaagcggttttgaagccacttccttagctcccatagacaggcagtgctggaaacacacatgcagggagctcccagccggtgttgtgcgatacagaacccgaaagctgcgccctccccgcaaggaggttgtctatagaaaattctgtgacatcaggattcttcaataatctcttcaacatcagctctcaacatatttatagaagatctccaggcccagcagttttcctacctgtgcaaaatgctgtggcttcaaagtaatgttttgttgtgttttgttttgtttttgagacgagtctcactctgtcatccaggctggagtgcagtgatgcaatctcagctcactgtaacctccgctcccgggctccagggattctcctgcctcagcctcccaagtagctgggacgataggcgtgcaccaccacacttaggtaatttttgtatttttagtagagatggtgtttcaccatgttggccaggctggtctgaaaatgctgacctcaagtgatccacccacctcggcctcccagagtgctgggattacagccgtgagccaccacacccagccaaagtaaatttaaaaggggctttcgtcctcctaggagtcagaatcagtcctcactgtaagaagcagaattctaacctcaaaactggtctcctgggaacactggaaagcagtgcgtgatccgaaggggcagaaatgactgacactctcaaattcccctctgcatcatgggcactcagcactgtgcctagtgcatagtaagacttcaacaaatatgtgctgttgttataattcggcatgacgatggaggtgcagaggtttacctgtgtttttattatctctggttgacaaggcggccacacccaggttgcctgttctgaagctgtctcaagacagtgaccatcacccaggctgaggtccaggatgatgtgagtgcaaattgctaaagctctccttcaggtgccaggcctgccatgacacatggcgagtcctagcagaggtcagaccaacaactcagttctttcaggtaacctgtactgatgaaaccgccccccccccccccgccaatcttactcttctgttatttcatgtctatgaagggttttggcataaaaaaaacaaaaagcctcattttaaaaaaatctacaattgtttaggtttttgtttaaagagaagcgtctggttctgttgcctaggctggagtgccgtggtgcaatctcggctcactgcagcctccaacccctggcctcaagcaatactcctgcctcagcttcctgagtagctgggactgtccatcttttttttaataacagctttattgagatataattcacataccgtacaattcatctgtttccagggtacaattcagtggtgtctagcatattcacacagggctgtgcaaccatcaccaccatcaacctagaacactttcatcaccccagaaagaaactccgcacccggctgcagtgacaccatcatcctggcttattgtcgtttgtccgccggccaccgttctgtctctgtttctttcccaacaccagcctctcttttcacgcactatctccccgccagccctgctccctgcattctgtaggaaatgcttggctcctacagtggttgacgaataccaaagcttctgtgagcacgccagagggcccccacaaagctctctcctctgtctgaaacattactctgaaggagtgatttcttgttcattctgaataaggatgacgacaccaggaagcggaggcccggggagcatttacggcgtgttctcgatgtgtgagcactgtggccagcacgttccaacccagtgctgcaagagttgctcccagccccacttcagagatgagaaaaccaaggcccagggaacccaaggtcacaaaggactctaagaaggagagttgagtaatcccagcactttgggaggccaaggtgggcagatcgcttcaggtcaagagttcgagaccagcctggccaacatagtgaaaccccatctctactaaaaatacaaaaattagccaggcgtggtggtgggcacctgtaatcccagctacttgggaggtcgaggcagaagaatcgcttgaacccaggaggtggaggttgcagtgagccgagatcatgccactgcactccagcctgagtgacagagtgagactctgtctaaaaaaaaaaaaaaagagagttgaggctgggcgcagtggctcatgcctgtaatcccaacactttgggaggccaaggtggcaagatcacttgaggtcaggggttcaaaaccaccctggccaacacggtaaaacccccgtctctactaaaaatacaaaaattagccaggcatggtggcgtgcacctgtagtaccagctactcaggaggctgaggcaggagaatcacttgaacctgggaggcagaggttgcagtgagccaagatcgccccactgcactccagcctgggaaacagagaaactcttgtctccaagaaaaaaaaaaaaaaaagaagaagaattgaaatttgaactccaagcaatgtgacaccagagctcaggcccggaaccccatgctacactgactcttgttgagagaacactccaagatgtaatcatgcctacaatgacgttgcagggggaagtgactgatccactactttcctggagaacctgggaaggtatgtgtgatcaggaggataaaaggccagggaacaagaaaactgcagagaggagacccagcaggcaagatgctgcaaaaggtgcagcggaactgagtccaccgaggagctaaaaatccctccgtcttagaattctgtccttgccaggaaagggctcctcatctcctgattgctaattaactttatctccttgaatcaagggagctaaaggaagtctctgaattagaaacctttgtggtgaggggtaaaggaactttggtaagaggatataatcaaaaatatgatgattaaagaaagatgattaaagcttggaaagcaagtcactaacttattaacagtggctatctttaagggatgggattagtaaagattttcatttccattttatacatttctatattgccaaattttacaacaagcttatagtacttagaaagttggaagaaaaaccggccgtgcacgatggctcacgcctttaatcccagcactctgggaggccgaggtgggcagatcacctgaggtcaggagttcgagaccagcctggccaacatgatgaaactccatctctactaaaaaatacaaaaattagctggtggcgggtgcctgtaatcccagcaacctgggaggctgaggcaggagaagtgctagaacctggaaggcagaggctgcagtgagccgagatcatgccactgcactccagcctgggcgacacagcgagaatccatcgaaaaaaaaaaaaaaagaaaaaaaaagaaagaaagaaagttagaagaaaaaaccaaaaagatgacctggggagaggggaagaacttctggaataatgaagtgagaagcttggcaaaacctctcctcaaaaagtaacaacaaaactagacaagtcggtcaaaaacaaccaccacagggttggaaatcaaccaaagacatacaaaaaattgaaaaatgtttattcaagaaaaactacgcagctgggcatggtggctcccacctgcaattgtagcactttgggaggccgaggcaggaggattgcttgaggctgggagtcagagaccagcctgggcaacatatcaagaccccgtctcaacgaaaaacaaaaaagtcagcctggcgtggtgatgcacacctgtagtctcagccactcaggaggctgaggtgggaaaatctcttgagcctgggagcttgaggttacagtgaactatgattgtgccactgcacgccagcttgagtgacagaggaaggcctcatctcaagaattaaaaaataaaatgaagaagaaaaatgaccaaatcttgagttagagcggtggtgttctgtgatgctttggcttgaggggctcccctccttcccctcagctcacccatgctgctacatctaccagggtgggacgagctgtgaaaattggtggctccactgctggaggggttgacttgatttggaggagagcacatgcccaaaggcactgacataaaccacggtgatttcctgtaaacaacaggaaatgtacagaaggtcaacatctcagccaccctgagcctgcaatgccggttgtggcaaccaacagatcaggagaccagccaaaaacctagccggaagatacagagaataagggagctatcacgggcagtggtaaagtccctgaagtcccacacattcttcgtgctctggaaggctgcacacaggcaggaaagactgaagagggccctggttatccactcatccttggctaaagtgaggcctaccccacgcacaaaggaggccagaaaaggcctggcaaaaaggaaaaaccaagacaggctcgtataatatatgcctgaattctgaacatgtccctaaacgtacacacatatccaccgcaaactgtgaaaagcattagtagctcaaggtgtttcagcacacctctgaataatcattgcctgaccactaagctatgctgacctgggttaacccctgcaaagccaggcttaaacacattttaaaaataagaaaaaaaaaatgagcaggatcatcagcagctgctacagagacagacttcacagaattaatccaggcaagtcacaaacaaaaagaaataaacaacaaacctgcgttttgccaaaggtgatcataatccagagttgctacaacgtattaactaaaatacagagcttaaaaaaataaaatataagacatgcaaagaaacataaagtattgtgaattatactcaggcaagagtcataactggaaactctaagggggcccagatattggacttaacaaagatttcaaagttataagaaactactgtaagaatggaactgaaggaattcatgtttaaagaactaaaggaaagtatgtaacaatgactcatcaaatagagaatactaataaagagacagaaattataaaaagaaaccaaacagaaattctagagttcaaaagtataataactgtaatgaaaagttcactagaggggctcaacaacagagttgacatgggagaagaaagaatcagtgaacttaaaattatccaatctgaagaagaaataaaaaagcataaagaaaaataaaaagaacctcagaaacacagggataccatcaagcatgccaacatatatataaaggaagtttcaaaagaaaacgaagcaaaaggaagcagaaaaaattttttgaaaaactaatggcataaacttctcacatttgattttaaaaaattaatgttcacatccaacaaactcaaagtaagctcaaaaaactccaactcaataaagtgagccaccatgacacatcatagccaaactgctggaagccaaaaacaaagagaaaatcttgactgcatgaagacaaaatggttcttcatgaaaaggagcactaccataagattaacagctgacttcacgttagaaattaacagagaccagaaaacagtaaaatgacatattcaaagcactgaaagaaaaacttccaatcaagaattccatatccatcaaaaccataccccaaaactaacaagtagaaataaagatattcctagataaacaaagacagaaaatttgttactggcagaccctacttacaagaaatactaaaggaagcccttcaagatgaaagaaaaaaacaccagattatatcctgaatccacatgaagaaataaagaatgctagtaatactaattacataggcaaatatacagcagatttataaatagtctcttttttacacttaactgatttaaaagacaagtacatataacaataactacagacttttactactgggcttatgacatacaaagatatcatatacatgacataataccacagaggaggtagatagacatagacatttaatggaacaaagtttctatattttattgaaaatgaattagcattaatctacagtagactgtgagctctaggcacagtggctcatgcctgtaatcccagcactttgggaggctgagatggaaggatcacttgaatccaggagtttgaaaccagcctgggcaacatggcaaaaccccatctctactttttaaaagctatatatagatctttaaaaagtagactgtgatgagatgcatattgcaatccttagagtaaccactaaaaatataaccaaaaaatattaaaaacctcaccaaacagatgaaaacagaacactagaaaatatctatttaacacaaaagaaaacagtaaggagaaacagaacaaaaagatgtgagacagagaaaacatagcaaaatgttagatgtaatccaagcatatcaataattgcattaaatgtaaatggattaaacactccaataaaaggtgaagactgtcagattaaattttttagaagttctaaccatgtgctgtctgcaagagatgcagatggagaaaaatgtactatgcaaacaaaaccataagaaagttgcagtggctataataatatcaaagtaagtatgggaggctgtggcaggtggattgcttgagtacaggaattcaaggttatagtgagctatgattgtgccactgcactccagcctgggtgacagagtgataccctgtctcaaaacaaacaaacaaaaacacaaaaaaatcccacagactgaataaactttaagacaaaaaagttataagagaaaaagaaattttgtaacaataaaagggtcaactcatgaggaatatataaaaacataaatacataagcacttaatagcagagcacaaaatacaataaagcaaacactgactgaaccaaagggagaaataggcaattcacaataatgtttggagacttcaatatcccactctcaataattgacataatagttaaacagaaaatcagcaaggatatacagactttgaacagcattgtcaaccaacctgacgtaactaacatctgtagaccatgtcaagcaacaacaaatagaatatatattcttttcaagtgtacatatcgcattgtctagaatgaatcatgggctaggtcataaaacaagtatcaataaatttaaaagaattaaaatcatataaagcatgttctctaccaaaatgaaatttttaaaaatcaagaacagaaataaatttgtggactccccaactacttagaaattagaaaacatatctaaaggattcaaaggtcaaagaagaaatcacaagggaagtttaaaaatacttcaaactggatgaaaagaaaaacacagcagatcaaaatttaggatgcagctatgagaagtacttagggagaaatttataatgttaaaagcctgtatcaggaaaaaaaaaagaaaagtctcaagttaataaactgagcatcagcagggaacagtggctcacacctgtaatctcaacactttggaaggccaagctgggacgatcgctcaagcccaggagttgaagaagagccttggtaatatagtgagaccctgtgtctacaaaaaataaaaataaaaattagctggcccaatggtacacacctgtagcctcagctccttggggggctgaggtgagagaatctcttgagcctggaaggtggaagctgcagtgagccagtatcgcaccactgcactccagcctgggccacggggcgagatcatgtctcaaaaaaaaaaaacacaaacctgagtttccaccttaagaaactataaaaaggagagtaaactaaatcccaaaaaaagcagaaggaaggcaataataaatactagaccagaaatcaatgaattagggaaagtaatagagaaaactgatgaaaccaaaagttggttctttgttcagaaacaaaacaaggatgtctactctcaccatttctactcaacattgtactggaggtgctatccagaacaataaggcaggaaaaagaaatttaaaagacacagattggaaaacaagtaaaactcttcatattcactagctctatatatagaaaatcttcaggagtctacaaaaaactactagaactaataagcaagtttaacatgttcataagatacaaaatcaatatcaggaaatcaactgttttgtgtataccagcaatgaacaatccaaaaacaaaattaagaaataattccatttgtaatagcatcaaaattagtaagttaaaattacaaaactttgttgatacattaaataatatctaaataaatgtaaggagataccaggttcttggattgaaggactcagtattgttaagatggcatttcttcccaaattgatcaacagattcaacaagacccagcaagctttttgtagaaattaacaagaaaggttatgagtgggtaactgaagctgggtaacgtgtacctgagagttgattatactactctcttcacttttgtttatgtttgaaatcatccataataaagtgttgttttttgtttttgagagacagggtctcactctgtcactcgggctggagtacaatggcacaatcagagctcactgcagcctcagtttcctgggctcaagcaatcctcccacctcagtctccccattagctgggactccaggtgggtaccactatgcccagctaatttttttaatttatttgtttatagagacagggtctcaccatgttgcccaggctggtctcaaactcctggactcaagcaatcctcccacctggacctcccaaagtgctgggatcacaggcatgagccactacatttggccagcaacgtggtttttgtttgcttacaaaaaaaaaagaagactacacaaaagaaaaaaatgtacaactaattcaagggctgccttaattattcctcactctttaccctcggcccacatcatttccctacaggctgatccttgcccagtccactcctgattcatggctggtgaataggtgagggaggaaaatggagagagcgaatacacagagtgacagagggaggagaagtgaaaggtcataggcattcgctgcagccatgcctgtagtacgtccatcaccaggcttcaatttatagcagctacatgactgcgtgtgtcaatctctaactggctcatgtgccagaccagaagctactattggaaaatgcccctctctcgtcatgtcgtttgcacagtaattcacttagatctgaactgagtacaaatgagtggtgctctaagatcaaagcaccagggtctttaaaatgatcttcactctccccgcaacctgccccgaacacgtgcatgctcctttcactttcaattccaaactgcacccttctaacgctggccgaaagggaaagtaagccctgttttcgtttcctttcaaatacttgatgctttccaattttattcctattttccctaatggaataatacttactacttggaaagcatcattcatctcctctcaagatcctcacagcaacaccatgttgccagaagggcaggtgcgaaatctgaaataatggcagaagtcgaatgtcgcacgtcaatgtacagcctcccatcgaggcccatggctttatttttatgtatttatttatttattgagacggagtctcactctgtcacccaggctgcagggcaatggcgctattttggctcactgcaacctccacctcccggatttaagcaattctgcctcagcctcccgaacagctgggattacaggcatgagccaccacacctggctaatttttgtatttttagtagaggcggggtttcgccatgttggccaggctgatctcgaactcctgacctcaggtgatctgcccgcctcggcctcccaaagtcctgggattacaggcgcccactgccacacccggctcagttttgtatttttagtagagactgggtctcaccatgttggccaggctggtctcgaactcctgacctcaggtgatctgcccgccttggcctcccaaagtgctgggattacaggcgtgagcctccgcgcctggactaaggcccatgactttagcaagcgggatgttgttttccacctcctgctgctgcctcttaaggaacaggggcgcttcttcaccgcagaggagacggttctccattctaggaatgggtatgaacttgcctgaatagtctatgatgggcaatggggacgttccatctacatctcattatgaaaatccccaaaaaccttacaaaaccatataatcgtgaagttttaagaagtcttaaatagttctaatatataattctccacaaatcttttctctctaaaaaacacttatttttctcattttgatatgccacttcaaagcttttcccactccttgagtatatttacttttctctctcctctctctagtgactgagcagtgattttacctttacctatttatttagagatggaggtctcactctgttgcccaggctggagtgcaggggcacgatcagggctcactgcaggctccacctctcaggttcaaacaatcctcctacctcagcctccagagtagcttggaccaaagatgcatgtcaccacacccagctaatgtttttattatttgtagaaatgaggtctcgctgttgcccaggctggtctcaaatgcctgggctcaggtgatcctcccgcctcagcctcccaaagtgctggaattataagtgtgagccacagcttcccactaacaatttcactttttaaagagatgggtcatattgtccagtaacatttacatgagatccatgaaaaaaaagtgaatattattctttagaataataaacaattcatatcacaaaattagctttaaaagattcccgcttgtaggagctattagaatttcaaaactgcccagttaaacataacctggttcatcccaacgttttcatttacatataattcaaaaagatttacttttccataaatttcaaatgctcttcagatgaaggaaacattcatcattacatcaaagcaagtgcaacttcaatactaaatttcctgatcttttatacaattagactgcaagtgctcatctgagacagatttagagaaaattgcggctgatgcccagctctatgaaagagttttaagaactgaaataacttaaaaaaaattagaatcacagaatggggggagatgagaaaaaattcatcctaaattagaaatacgaactcctgcccaaagtgcagggtttttaaaaaatggaattgttaaacagattgaaataatatttagaaacaacaccagctcacaagggtagtaaaatactaattcttaaaatcgttaaacagattgaaataatgtttgtcaataacaccagctcacaaggatagtaaaatactaattcttaaaatcctccctcttgcgctatgcctgcttctgagttggctgagcaagttccttcccttccccaggcttctaacagtgaacatgatctggcagcattagacacaccacaactccactccagaccaagatgggtctgggtcaaacccaggacttctgcttcaaattaggagagttaccaaattaagacaattctgcctcaactgagtcaccctccagggacagctgagtccatttccagggtaagtactggggtagctctacccaccccagagagatgtattttatggtctgtcctaaacagaactggacccccagagaagttccgagatcagcacagcctgcagctgaccctcgggagagggtcaattcagggcatttgctgaccaaaaggatggatctccctcaccgggaggtggactgcaacctcccaaacactttgccactgtagctaatgtgtgcaaacatttactttgtgaatttgtatcttagtagcttcactaagtcagcaaaatccaatctctgaatctttttgtggtgactgaactaactctatgttgcacttttggtgaaaaactgcaacatagaatttaattaattctttaattaaatgggttaagggaaaaaccgtggcaataattttttttttcctctttcacttttgggatttgaggtcttcaaataagtttttctaattgtagggaaaacaaagtcttttaataattaccattaatgatttataatttaagcagtttaggaaataaaaaatgcatagaacatgatattctcatacccagacaagctcatatcccacctgcacccctttacagtcaaggatgattttgcatctcctttcctcacttaagtgccttttttgccaactaggataactcatataatgaatttttgccaactaggaaaactcatataatggctttttttaaatctggtttttctaataataaaatcatatctgttgcaaaaaaaaaacaaagcaaaaaaaatattagtacaagttcctctaatcccactgtaaagaacacgcgctatatataaatttgtatatatccttcaatgcatgtattattatctctctagacccacattattaaacacgctattttatggaaaatgagatcatgttttacatatggtacagttgcttgcttttttcaattcacagttcatggccgggcacggtggctcacacctgtaatcccggcactttgggaggcctagatgagcggatcatgaggtcaggagatcgagaccatcctggctaacacggtgaaaccccgtctctactaaaaatacaaaaaaaaattagctgggcatggtggcgggcgcctgtagtcccagctactcaggaggctgaggcaggagaatggtgtgaacccaggaggcggagcttgcagtgagccaagatcgagccactgcactccagcatgagtgacaaagcgagactccatctcaaaaaaaaaaaaaaacaattcacggtggctcttttgcacatatgggtacacgcagatctatctcattcttacaaatggttacaactattccaccataaggacagaccataatttccacctaatagatgttcaagtgatttcccactttctgctattacaagaaagacagtaaccaagattctcatacatacatttttgtacttgtgcaaatattgccatagggtaaatccctaaaagtgaaaggacttggtcaaatggcatgacatgtgaaattctgaagatatgcaaaatgtcctcaaaaaggtttctgcaattcgtagtcccaccaacagtgtttcagagggcctgcgttccctttcctctcaccaccaacaactagaatcaattttttcatctttacgaatcaaagagatttttcaaattttttttcttatttcaatatgctgttgttgtaagttattattattattattattattattattagggggattgtacatttagcccaccgcacactagctgcatgacctagagaagtaatttaatatcccggttccttggttgtaaaatgcagataatgaaagtaacatctacttctcgggggagccgtgaagatgtaatgagcgaaggcatctcagacacttggtgccgagtctgacagagtggggcttcaacaaaggttggaagaacaacgaataaatagaatatattctatgaacaatgaataaatggaatatattctatcagggtgacttaccagagttacctcactcatcaccaatttggctgctgttcaatttttgctattctcaattatattcgtatcattgagtaaattattctcttgtatctacaggaccatcttctaaggcgactctcccaggattcggacagtgttacagttcttacttctgttctttagaagaagtgaaccagcaacaacaggccacccatcaagttttagaaaattttctctgccttaaaaagtatataatgcggccaggcatggtggctcacacttgtaatcccagcactttgggaggctgaggcaggtggatcacttgagggcaggagtttgagaccagtctgcccaagatggtgaaaccctgtctctactaaaagtacaaaaaaattagccaggcgtggtggcacatgcctgtaatcccagccactcaggagggtgaggcacaagaattgcttgaacccgggaggcaaaggttgcagtgagttaagattgcgctactgcactccagcctcggcaacagagtgagactctgtctcaaaaaaatatgtatgtgtgtgtatgtgtgtgtgtgtgtgtgtgtgtgtacttttaaggcattctcttttgtacttttaaaattactagtaaggacatacatttccatatcactcactgtttgttgtatagaaaataagctttatcgttataattttcacgcatatatttttctccaaattatgacctggaaaaaaaacttgcagctagtaactggaaaactgggtaacatatatttataaaagacaaacacacatgtatttcttatatgtggcttttctctaccagtaaagaataggatgtggatgaaagtttcaaataatattatgttataaaccttatataattactgaactcaacaaaacttttgaaaaataaccaagtagaagttatttttagaaacctggaatgtcattccacctaacagaaattaaaactggctgggcctggtggctcacacctgtaatcccagtgctttcgaagaccaaggcaggaggatcgcttgagtccaggagttcaagtccagcctgggcaacatagagagatcctttctctttaaaaagaaaaaagcgaagtgcagtggctcacacctgtaatcctatcactttgggaggccgaggcaggaggactacttgaccccaggagttccagaccagcctgagtaacataagaccccatctacacacaaaaatacataaaaatgagctgggtgtgatgatgcatgcatgtagtcctagctactcaggagtctgagatgggaggattactttgagcccagaaggtcaaggcttcagtgagccatgatcagaccactgcactccagtcttggcaacagagagagtctccgtctcaaaaaataaaataataataataataaaaaccaagataaataatataaccacaacttttcttgacccatcaaagaggcggggttacaaagtaaccaagtagtagccaggcgtggtggctcacacctgtaatcccggcactttgggaggcccaggtgggcagatcacttgaggccaggagttcgaggccagcctggccaatatggtaatatcccatctctcctaaaaatacaaaaatcagccagccatggtgatccatgtctgtaatcctagctactcgggaggctgaggcgggagaatcaattgaacccgggaagcggaggttgcagtgagcagagatggtgctacttgcactccagcctgggcaacaaaagcgaaactcagtctccaaaaaaaaaaaaaaaaaaaaaaaaaaaaaaaatcaaaaaagttgaaaacagatcaatatctggcattgaggcttttaaaaagtcaaatccaaaattccttataaaggttcctgcaaagccaacttaaaaagggtccgtatggtggatcacaattcttgctacatttgatgcaaatcttcaggccaagtataaagcaactaaaatttgttttgcaaataaattggtcttactattatatatataatttatccctggtagaaatggggaaactggagaaagaaaaatttagattctagccttaaccattgtttgtgagtttttattatctgcctacaatttgggctaatcctgaaccatttcctggctgcaacaagtctctaaagaagaaccgagttttaattttcatcatgatgcattttagttggcttcttaacagaatacgttcttttttcattgttgttctggcccacgaattctgggtttttttgtttggtttttgagacagagtctcactgtcatccaggcgggagtgcggtggtgcggtctcggctccctgcaacctccacctcccgggttcaagcgattctcgcgcctcagcctcctgagtagctgggattacaggcgattctctttctattgcaatctctgtgtgcacagaattctactatccgagtgatcgatgttatatatctcacattgttttgcctattctgacagaaccaaagccactgcattctgaagactgaagacgatttaaaagcctgtgaatctcccttgtttggaatcccactgggcccgatctgttttccatgaccaaggcactgctgctaaagctatacagtatcaagcaccctccttaaaggctcagggaccatgaaggaagaagagggcatgtgagattacaagagctggattacaagagtggactgtggaggctgaagtagctccatcgtggatgctactccgccatgtggcttctgattaaccccagttccaggaaaccctctgagatttccagcttatgcgctgttcctcgtgtaagaccaagaacttaccataaagcctgaccttaggtcaaacaactttgatgttattgtactcacactgacctacacatccctctgaatcaccccttccctacggtatacaagccctgggaccaggggataatggtgcagggatccactgtctcttctcgctgcagccccagttcacagactaatgaacagaagcttgagaacagacatagcttctgtgcataagcccctattaaatgtttctaagaaaaaagaaaatgcttgaagaagaaagaaaggatagaaggaaatatttgaagagataatggccaataattttttaaacataataaaagacatcaaagcacagatccaagaagtttagaggactccaaaaaagagaaataccaaaacaacatcatgtccaaattgtcgaaaactaaaaataaagagaaaatcttaaaagctgccggggtgacagtgggaattgggaaacatattacattcagaggaacaaagaaaagaattatagcagacttctcaccaaaacaacaaaagccagaaggcagtggtgtgatatctttaaagtactaaaagaataagttgcaaaaaaaatttttcaacacaaaccttcatatcctaaaagaaaaaaaaaaaaaaaagaaacaaacaaaaccaaaaaaaagaaaaaaccgactcttaaaaatgagtgtctcttggatctccttggtatgaaatttttctttaaacattttcttttttttcagaaagagtctcactctattgcccaggctggaatgcagtgacgtgatctcagctctctgcaacctccgcctcctgggttcaagtaattctcctgcctcggcctcccaagtagctggaactacaggcatgcgccaccatgcccagctaatttttggtagagacggggtttcgccttgtcagccaggcaggtctccaactcctggcctcaagtgatcaactctcctcagcctcccaaagtgctggaattacaagcatgagtcaccgcacccagccctctttaaaaacttttttttttttttgagacaaaagtctcactcagttgcccagactggaatgcaatggcgcgatctcagctcactgcaacctccacctcctgggttcaaatgactctcctgcctcagcctcccaagtagctgggatgacaggctctcaccaccatatccagctaatttttgtatttttagtagagacagggttttgccatgttggccaggctggtcttgaactcctgactgcaggtgatccacctacctcggcttcccaaagtgctgggaataacaggcatgagccattgtgcccggcctaaaaacattttctaatgggagggaaataaaaactttttcagacagacaaaggctgagatcatttattcccagaagacctgtagcataaaaaatgttaaaggaagtttttcagtcgggagatgagacagaaacctatagatctacacaaagaaacgaagagttcctgaagtggcctaaaaagaagaaagattttcaaaataattttcaaaagtattttgaaaatcttccattgttctaaaactacactgtctatatggcagccgcttaaatttaaattacttaaattaaactagtttatttaaaattcagttgttttcaggtactcaatggtcacacatggatagtagctaccatattgtatagtctagatataaaacatttccatcattgcaggaagtttcatcaaacagcattgctctaaaaggtaattttctgtaaaaataacatgttatgaggtttataatatatataaaatacattattatgacactattagcatcataaacatttacaaggttctcatagaaccttgtagtaacttacagttatgaagaattcttacgaggttcttatataataaatggtataatatttggaggcagactgataaaaaatgtactttgtaaatttcgggcaatgacttaaaataagtgagaaaaaatatataagaaataaatcgatagaagagataaaaatagaatcatgacaaaaatctggctgggcacagtggctcatgcctgtaatcccagcactttgggaggtagaggtgggaggagcacttgaggccaggagttcaagaccacgctgggcaacatagtgaggatctgcctccgcaaaaaaaaaaaaacaaaatttaaattaaaaaaacaattagccgggcatggtggtgtacgcctatattcccagctacttgggcgacagaggcgggtgggtcgcttgagcccaggaggtcgaggcttcagtgagctacgatcatgccattgtaccccagtctggatgacagggcaatacccagtggcaaaaaaaaaaaaaaatagaaaacacactagcaaattgtctacaaagtggaaggttaaaaagtgatcgaggggaaaaaaaagcagttcggtatttctttacatagacaattcaaaaggttgttctgaatctcacaaagatttattgaaagttgttacacttttaagtactactttatggccgggtatagtggctcacacctgtaatcccaatacttttgagaggctgaggcaggaggatcgcttgagcccaggagttcaaggccagcctgggcaacatggtgagaccccgtctccacaaaaaaatagaaaaattagccagctatggtggtgcatgcctgtagtcccagctactcaggaagctgaggtaggaggatcacttcagcccaggaagctgaggctacagtgagctgtgatcatgccactccactccagcctgggtgacaaggtgagacctgttactatatatatatggagtgcagtggcaccatcttggctcactgcaacctccgcctcccgggttcaagcaattctcctgtcccagcctcccaagtagctgggattacaggcatgtgccaccacgcccagataatttttgtatttttagtagagatggggttttgccatgttggccaggctagtctcgaactcctgacctctggtgatctgtccacatcagcctcccaaagtgctgggattacaggcatgagccaccgtgcctggccagtgcctaattttaatctcttactaaattaaccactaaattaattttttaaaccccagaggaacattaatttacagcagaagaggtaagggaaaactggatgtactggcaagaaatgtacccggtcccatgtgtgcaatctgtcaacatgtaaatactgagcgtctgctaaacaccatacaccagggacacaaaaatgttgcaaaatgtgtcctggagagctcagtgaaggggagacacaactccaaagacccattaacgcaaaaggaggtaaaaagagacctggcaaggaatggcggctggggcagcgggggggccaggcgggagggctcaggaaaagctttccaacggagatgctactggatcttgtaaggtgggcaggggtccaacctgcacagatacctggctgagagtatctggcttatttgggaaaaatgcaggcagtgttttttggagaaacagataaattttaagtctggaagagttcataggggttctattatcctgaaatgcatcgctgttatttctttaagtgacagatatctagttaatgaggagaaaaggcaggcacaaaagcacaacgtgatgacagagcaaatgcaaaataacagctgggtggcgtagcacatgcctgtggtcccagctacttgggaggctgaggtgggaggatcacttgagcccacgagttcgaggctgcagtgcgctaccatcacacctgtgaacagccactgtactgcagcctgtgcaacacagcaagacccccgtcttacaaaacaaaaatgcaaaacaaaattagtgcccaatttctcaggtttatgcctagttgctaatctgtgacatctctgttagaaaagctaacaagagcctaaaagaaaaattcaagtcagctccaggactgatggtggcaaatctacaactccttccacttaaaaattcaacaaaataagagatttagatttttgcatttttgtgtgcccaaagaaaaaggctccagttttctgtttcgtgttccatcagcttacataacctaactcgtcccacacaaagacagacgaatgatttttcttgcagatgaaatattcccaagctctcacctctaaggtctaagtggatcttgtgataaccagcacaaagtgaggctggggatttgaaaagaaaataccagaaatggttaccaaaaactgacaagagcacccaaacagcatctgtgatcgctagaagatagacgcactgacaaattaaggagccattaattagtttcaaagagaaccaaatggcatcaataattttttttttagacaaggtcttgctctgttgcccaggctgcagtgcatcaataattaagaatcagcctcctggctgggggcggtggctcacgcctgtaatcccagcactttgggaggccaagggaggaggatcacctgaggtgaggagtccgagaccagcttggccaacatggtgaaaccccgtctctactaaaaatacaaaaattagccgggcatggtggcaggcacctgtaatcccagctactcagggggctgaagaaggagaatcgcttgaacctcagaggtggacgttgcagtgagccgagatcacgccattgcattccagcctgggggacaaggttgagacttcgtctcaaaaaaaaaaaaaaagaatcagcctcctttctgtacacgctttccacagctagcatgcggactcactggactacagggtgtaagatgaggccaactgtaagccctatacagggaagttacagttttgttcaaaactcactcacaattgggaacagcctgagaccatgcctgcatggaacagcacagccttgtccccccccgaggacacttcctgtgacatctggagagatgagcagattcacgaggcccaggagggttttcaggtggtctttctggctgtagagagatcaaacacacccttccccaacgtcctttaggagtaaatgaccaatttagcaacaatgagcactcaagaagtacgccagcattctctttattatgattatttcctgcacattacatcatgccttcttttcttacagcgggaaaacacccacacacacgcacacaggtatatgcacacacacacatcaaaagttactgtaactcctaagcagagaataggcatatttttggcctttacctttcagtccaattttttaaaatgagatataaaaactgaaaaggaggggattttaaatttatatgattttctgccaagaaaaatctaaggctatctgatttttaaaaatcagacacaggccaggcgcggtgactcacacctgtaatcccaacactttggaaggctgaggtgggtggattacttgaggtcaggagtttgagaccagcctggccagcatggcaaaacgccatctctactaaaaatacaaaagaaattagccaggcgtggtggtgcacacctgtaatcctagtacttgggagtcttcggcagaattgcttgaacccaggaggcagaggtggtagtgagccaagatggtgccactgcactccagcctgggcaataaagtgagactctgcttcagaaaaaaaaaaaaaattcagacacaataagcattcaattaagtgtccagttacaaagaaaaataacatgttcagcttcatagtttcttataaagttaaacacactcatcatacaacccagtcactccactcctatgcatttaaccgaaacaaataaaaatatacatccacggaagacttgtgaatgttcacagcaactctattcataatagccaagaactgcaagcaactcaaatattcatcaactgataaactgattttttaaaatggtggtatatccagtccaggcacaatggttcatgcttgttatcccaacactttgggaggccaaggtgggaggattgcttgaactcagaagtttgagaccagactgggcaatataatgagacctccatctctacaaaatacttaaaaattagccaggtgtggtggtgtacacctgtagtcccagctacttgggaggctgaggtgggaagatcacctaagcctaggaggtcaaagctgcagtgagatcacgccactgcactccagcctgcctagagtgagaccctgtctcaaaaaaagaaaaaaaaaaaagaaaacaaaaacataaaagtattagaagaaaatataggttaatattttacatagtcctcaggtggggaaggcttttctaaccatgatactaaaggtagaaaccataaacaatgattgatagataagaccaacataaagattttaaatttccacatatcaagaaatatcacgattgaaagacaaattagaaaatgggaggcattttacaacatatatggaagacaaagatttaagatacttacataaataaagaactttcacaaatcagtaaggaaaagacaaccaattcacaagcaactcatgaagaaatacaaaagggcaacacacatatgaaaaagagatttggccccactactaattatcgtgggcaaagacaacggcaaataaggatattcatcacactgttataattgacaatattatatttcatcgagtctaagatgccaatgatgatgtttcattactttttgttctattaaaatataatgcaaagtgctgccaattaaactatgacataccattaaattatacaatgcatcctgatgtgagggatggctggattattaacagtttcatattgtgatatacaatgattcaaagctggaaacaatctacatttccaacaagagatatttcctgaataaattatagtacatccccagaataaaatctaagtcatttaaaatgatgatacagatgtatgtacagacttggccaggcatggtggctcacgcatgtaatcccagcactttgggaggccaaggtgggtggatcacctgaggtcaggagttggagaccatcctggccaacatgttgaaaccccgtctctactaaaaatacaaaaattagctgggtgtggtggcggacgcctgtagtcccagctactggggagtctgaggcaggagaatctcttgaacccgggaggcagaggttgcagtgagccgagatcatgcccctgcacttcagcctggatgacagagcaagactctgtctcaaaaaaataaaataaaataaaataaacaaagatgtacatacagatttaagtggaaaggtattcatgatccatgaatggtgtttaatggtgttaatggtgtttaatggtgttaatggtgtttaatggtgttaatggtgtttcatatgacaccattatatctatatatatttatatgcattgatatatatttgattttgaataaatatttgatatatatcgtatatgcactgaaaaagtctaaaaacctcatgttgaaacattcaaaatggctatctctagttggtaaatgtttttttaatcttctttttgcttatctgtcttttctaaaacaccaaaaacatgttttacttttataataaaaaattaataaaaataagatggtcaccccctttgccatctgccaaaacagagagcttcaaaagtcacacattccttaaagctgcagtatttacaaaggaaagaaaaaccttcaagcaatctaaaaagctcaaacaggaaatgattaaactatggcatattaattcaaagaaatactatattatgtagatgcacaggaaaatccccatgaaatagcaacagaaaactcaaacacaaaatgaccaacatcaattttaacaaagaaaaaaattaccacctgtacctaagaatttaaagaagttaacagaggtaatttttcttttctttactttttttttgagacagtcttgctctgttgcccaggctctagtgcagtggcatgctcttggttcactgcaacctccatctcccaggctcaagtgattctcctgccttagcctcccgagtagctgagactacaggcgtgcgccaccacacccgattaatttttgtatatatatatacattttttgatagaaatggggttttgccacgttggccaggctagtctcaaactcttggcctcaagagtgatcctcccgcctcaacctcccaaagtgctgggatttcaggcatgacccaccgttcccagcccaacggaagaaatttttctaataggcttcagagaattatgtgttttgacctttccattaatgtcttatataaaattagtttgacagaaacaataaaaaatatatacaccttcagaatcatgacggcgttctccaggcctctaccagaaacatttttttcgtttttttttttttgtaaaaatatcaattttatgctccaaaaacattccacatggcaaccaaggtcccgtagagagcactttttcccccttgcctcttctttaaactcctaattcaaaattttggtttctgataacctgctcaggataaaaagaaaatctcacatagaaatgcctttactacagggaaatggagcaagaaatttcccttgtctctgggattgcttttttctgttttctggttaaggaaaacatttcaaagttcataaaaacaaggaactaaaattagagagatgagaactgaaccttgactcgaggtagggaaaacactatttttaaaccgagaaatatttctaggtctgtgctttatgagaaaggaagacgagcgtgctcatgtgtgtggatggtgtggcctggggagggacggtggcaggagaaaaccatctcccgcagcggggcattccctgcacctcacacacatctgctctcgtggaacacaaactggaactaatcagcaggcggcacctgggaattctagtcacttaacagcagggagaaggttgcacgttgctcacagcagatcatgaagccatctccacctcctgctgtcaccatcctcagaaccagcagtggctccatggctccctgactccagaggagctggccgcacaggagaccctctgtcattcctgcagaacagctaatgctttgcagagctccagatgtaagtttaagaaatacgtttgttataaggtttcttaacaagacacatcagtgatatctaagactcttaacaggtgactattaaagaaataaatctcttccacatattaaaaccacattcatcctgacagtcatagcccagctcgaaagccttcgagagtgcttttacctcccaccacatcaaatctagatttcttcctttcatcctgacacccacatgttcaacatcacagcacatgcggggagcccccagggtgcaggaggggaggagggcgctgtgtctgcaggggcgtgtgggtaaaagcaagagagggtgtaacggtgggtggggggagggtgctgtgtctgcaggggcgtgtgggtaagagcaagaggggggcagcaggggaggagggcgctgtgtctgcagtggcgtgtgggtaagagcaagaaagggggcggcgggggagtcttggagaagggaggggtgcggaggggcactgccttgtgaggtcactggtggtgatgtgggttccaagcagcaagaaaaagggattgaggccaagctggagaactgaaggcaagtcacgcacaggcagagttggttaaatgatccaatttcacaagtttctcctagaacaagcagctacattttcattttttaaaatgctgcatgaaggttgggcagtggctcacacctgtaatcccagcactttgggagactgaggcaagagtgtcacttgacaccaggagttaaagaccagcctcggcaacatagcgagaccctgtctctacaaaaaaaaaattgaaaattagccaggcatggtggtacacgactgtattcccagatactcaagaggctgaggcaggaggatggctagagcccaggagatcaaggctacagtgagccactattgccactgcacaccagccagggcaacagaacaggaccctgtctcaaaagaaaaaaaacaaacaaaattctatgttttaactaaagtcacagccactaatgcattgcatccctaagaatcattttctttcttcatgtcctccccgttcccacacacctaccttccttaccagcagaagcctgattctgcttggggtatctcccttctacctgcttaggaaggagatgcacacacgcacacacacacatgcatgcatgcacacaggcacacccatgcaagcacgcacacacacatgcaggcacacccacgcatgcacgcacacatatatgcacacccatgcacacccatgcatgcatgcacacatatatgcacacccacgcatgcacgcacacacatgcacacccacgcatggacgcacacgcacacacaccatgcatgcgcacacacagcccacccgcagtaagtagctggagcagggtaagttcaccccaatggggcttccctcccctttccagtaactaaggaggatgtggcacatggccccgccttggccaaagggagctgagagatgtctgcttagtttccatgccagtaaaataagacatgcaggattggaaaagcccctcttctttactagatatcactgtgtcattcggaatggctgcagccactttgtgccacaagggaagacatctcccacgtggcaaagacagcagagagcaaagatgaaaagcacctggggtcctggaaatgtcatcacacctctgaattaatcaaccctggaactgccatacttcttgttacatgagatagtaaatgcgtttttttgtttgtttgttttaggtaattttagttaggttttcgttaactcacaacaaaaaccatcttaaccaatataacatgcttattttatcaaaacataaagtcttttttttagaaaaatcacctatacataagttttctgtttgtgtgggatacaaaagtgtctttccactagtgtggctataataaaaaagacgaacagcagcaagtgtttatggagacgtggggaaatcagggcccgcacacactctggtgggaagagaaaatggcatagccactttaaaacaaactccagacattcctcaaaaagttaaacagagttaccatatgacccagcaattccactcctaggtacatacccaagagaaatgaaaacatatgtccacaggaaaacgtgtctgccaacattcatagaaacactattcatcatagtcaaaaagtgaaacaacccaaatatccatcaactgaggaatggataatcaacaaagataaacaaaacgcaatggaatattattcagccatgaaaaggaagaaagcactaatacatgctacaccatgggtgaacccagaaaacattaggctcagtgagagaagccagtcatgaagggccacatatgatgtgattccatttttatgaaatgtccagaacaggcaaatgcaaagagacagaaagcagcttaggggctgccaggggctgggagcactgggggtggcagctcgggtgtgccgggcttctctgtcgagtgaagaaaacgtccccaaattgtctgtagtgatggatgtcaaagtataggaactgtacacttaaactgctgaattgtgtgacatgtgaattacatctcaataaagctttcttttgtttgttttgtgtttttctttttgacacagggtctcaccctgtcacccaggctgggtgacaggtgaattacatctcaataaagctttcttttgtttgttttgttttgtttttgtttttgacacagggtctcaccctgtcacccaggctggaatgcagtggcacaatctcggctcacagcaacctccgcctcctgggttcaagtgattctcctgcctcagcctcccaagtagctgggattacaggcacccaccaccacgcccagctaatttttatatttttagtagagacagggttttaccatgttggccaggctggtctcgaactcctgacctcaagtgatctgcctgcctcagcctcccaaagtgctgggtttacaggcctgagccaccgggcccagcctcaataaagcattttttaaaaaatgaaatgttggctgggcacggtggctcacacctgtaatctcaacactctgggaggccaaggtgggggtattgcttgaggccaggagattgaaaccagactggacaacacagtgagaccccatctctacaaaaaattcagaaagtttaaaaattaggtggtgcacacctctagctccagctactcaggaggctgaggtggaaggatcacttgagcctgggtggtcgaggcttcagtgagccatgattgcaccactgcactccagcctggatgacagagtgagactgtctcaaaaacaaaaacaaaaacaaacaaacaggaaatgtgatagaatcagtggcaatctctgtgtttctgttattaacatagccaaactgagccgcctgctagttatcagaaacccaacaaggaacgacccatattcctgtgacttcttaagtaactacttaacttgcgcatttatgatactcatatcaacttcaactcccggccttctaactggtttagctacagccaaataaagtacacatttttaaaagtcttcagacgcctgtctctccatttacccattggtgccttaggtataaacagtgctgagtggtggcactggctggcaacacccagaggctgaaagggaggacactggaagctggacgcagtggctcacgcctgtaatcccagcactttgggaggtcaaggtgggcagatcgcttgaggtcaggagttcgagaccagcctggccaacatggccaaaccctgtctctactaaaaatacaaaaattagcggggcatggtggcgcatacctataatcccagctacttgggaagctgaggtggaagaatcacttaagcctgggacgcagagattgccatgagccgagatcgcaccactgcactccagcctgggcgacagagcaagactctgcctcaaaaatgaaggagagagagaaggcaccaggttccaaaagagagccgcaccaagtgtgtgcacccagcccccaggagccctccgtaaatgtgtgttaaatgaatgtgtgtgtgaacaccatcagctgaggtggtatagaaaaagcaactcctggtcagagcagggaggaactcatctaaaggggaggctcccaagagctgcagcagagggtcaccaaaggaggggaactccatgtgggattccaaccctgactggttacatggaagtgaacaggacctcgtcgaagagggagaggtctgcgttgcctccaagcagtgcttcttgaaatggtatccccccagcagccgcctcagtatcacctgggaacttgcaggaatgcacattcttgccccaccctggacccgctgagccagactctctagggtggggcccagacgtctgtgttttgactcagatgacatcggtgcaggctcgagagtgagctactcttccagggacaaccagtgtggtccttccacccatgcgtgtccagggatgaccagtgggtgctggtgttcagggtggtgtgcggacatccattcatttattgcataattattaaaaaaaaaacaacactcgctgagtatctactgtgccctaaaaaatgagaaagactccgctaatgtgtaggcagtcaaccagccctggtcagcgtactcacaggtaggcagacggccgcgcggagagcaccaaggggcagaaggatgctgcttgggggtggggaaggtggcgacgcaatgaaaacagatgaaggacaaggagaaaaaaaatcaagtgctgccagacactggcacaaagctggaagggaggtcacatctatcgagggggaggagggcaacacaggaggagaagagacagggaaaccgcctctccggtgccttccacagagggtccattgcaagcaagtggagaatcagccacatgccatgtactacgtggcaggggtggcagcccgagccctgagatcggagagcctatcccatgtgacgcatgtcagccacacatcacccaggcctgtgatgaaggacaagcgcacgctccgctctgatgacacgcgcagctggcacggacccaggagggatcatggacgtgaggagacgtcagtgtccaaagagggcccatcagcccagagaaagttgacacagaatcatgaaacataatctacttaggggacagctcactctcagcaccagtacaaaatgtagattttatccattaatacttccataattagctcaaaaaaattggactgtgttttttatttttattaatttttttaagacagggtcttactctgtcacccaggctgaagtgcaatggcatgatcttggctcactgcaacctctgcctcctgggttcaaacgatcctcctgcctcagcctctctagtagctggaattacaggcatgcgccaccacgcccggctaatttttgtatttttagtagagatggggtttcaccatgtttcccaagctgatctcaaacccctgacctcaggtgatccgcccacctaggcctcccagagtgctggaattacaggcgtgagccaccacgcccagccctccaaagcttcttcattctcccctaatcaaggtgctgctccttcttcaaatcctgccatcctaggagctcacctgaaccctattccattctgatactgcgccctacatcccaacaagttatgtcttttacctgcattctattaatgtgaaatccactctggctttcttggtgagcgtttctacatttacctgcacccctcatgaagcagggagtttcctcttttatggtgaggttttgttttgtatggagattcgtttgttctgtaacatctccttctttaagaacaaggaaggccgggcacggtggctcacgtctgtcatcccagcactttgggaggctgaggcaggcagactggttgagaccaggagttcgagaccagcctggccaacacagcaaaaccctgtctctattaaaaatacaaaaaattagccacatgtggtggcacatgcctgtaatcccagcttcttgggaggccgagacatgagaattgtttgaacccaagaggtggatgctgtagtgagctatgatcacattgctgcactccagcctgggcaacagagcgagattccatctcaaaaagataaaaaaaaaaaaaaaaaaaagaagaacaacaacagctaagagtttggcagagtttactctgcacagttcagggagggcactgagtctgtgggcataaacactcagtccctcgtgggatgtgctggatcaaatcagatcctttgctcagatactacagtcctgaagcaatcctgttactatttgctcggatactacagtcctgaagcaatcctgttactatttgctcggatactacagtcctgaagcaatcctgttactatttattttctttctttctctctctctcttccttccttccttctttctcttttctttgtttctctttgtttctgtctctctcgctctctccctctctttctccctttctttcgtttctttcttcctttcttcttctttttttttgtttttttgcgacagagtctcactctgtcacccaggctggtgtgcagcagtgtgagctcaagcaatgctcctgcctcaacctccccagtagctgagactacaggtatgtgccaccatgcccggctaacttgttactattaatgaggcctcacagataccttgatctcatggaggaactgccttgggaagtagatattaatattccagccactggaaaagtacatcatattccccaaagtaacttaatacactggcacctgctttatacatcggtctcatggtcagcatgaatcacaactcctaaactcacacagttctgaagactgatggaaatgaagattctggtttgtttttgtctttgttttagatagggtcttgctgtgctgcccaggctggagtgcagcagcatgatctcagctcactgtagcctcaacttcccaggctcaagcgaccctcccacctcagcctccagagtagttgggactacaggcacgtgccaccattcccatctagtttttgcattttgcagcgacaggatttcaccatgtgaaccaggctggtcttgaactcctgagctcaagcgatctgcccaccttggcctcccgaagtgctgggatgacaggcatgggattccaaaccaagattcttaatctcaaaattatgaacaagatcctgaagctcggtgatcacctcaggatctctgtccctcctaagaggctgtaacagcaccgtccacctcatccctctccgctccacaatctacaaaatctctatgtccaatcttatcttgccaatctacaactgtcttgtactacaatatactctaattgttaatgttggtctggtaggttcgcttttcataacagctttatatagagagaattcatatactgtgtaattctctcgtttatagtttataattcagggaggtttcgcacacagagttgtgcaaccatcaccatagcccattcgagaacattttcatcaccccgaaaggaaaccccatccatacccatcggcggtcacctcccatttcccttcagtttccccagccctggccatcactaatctactttgtgtgtatggatttgcctgtagttctagagttcctagaaatggaatcatataaaacgtggcatttgggtttttgttttgttttgttttgagacagagattgctctgtcacccaggcaatctcagctcactgcaacctccacctcctgggctcaggtgatcctcccgcctcagcctcccgaggggctgggaccacaggtgcatgccaccatgcctggctaatttttgagttgacaggattttgacatgttgcccaggctggtctcgaactcctgggctcaagcgatcgaaacgtggcctttgtggtctggcttttttcactgggcatgttttcagtattcgtccacgttgtcacatgtatcagaactccattcctttttaaggctgaatcgtatgctatcctacagaggtgctacgttttgttgatgtgttacttgttttgtttatgtgttcatcagcagacaggcatttgggctgtttccactttttggcaattgtggataatgttgctatgaacattcctataagtttttgtgtggatgtgtgtttttcacctcttaggcacaaacccaggagtggcatggctgggccctacggtagctccgtgcttaaccttttggggacctgccagactgtcttctgcagcaagtgaaccatttcacgttctcaccagccgtaaaggggaaagtctgggaggctcccgagacaagaccatggtttcttcgtgctcacatcttcaacctccagcaggtactccaaaattttccaccagtgcctgcgtgccaaggtggcttccaaagagagagcaaatcaagcctggccacaggggaccagggcacttcccagaacagtcctctccctggtgggatccttttgttccctggaaaagccaaccccccttaatcctgggtagttttacctacccacaggcttgaattacatcctaacaaacagtaaaccacacttgctgggactccgtgggcccgagggctgcttaacagcttggcaggcatccccggcagccactgtgacccagctgccctacaggccattccaagctcccccaacaagggcacttttcaggtgaactcatacaaatgtgtgccgagcgatacccctgacttggaggggactccagctgaggtcagccctggagcaggccccccacgccctatggatacttccaagcccaacttagcaaatacagctggaggcgtccaacctcacccagttgttcaaggagggaccttgccccttcctttgcctttaaggatgaacagattttttttctacttagaaactcaatgtgttcctcttctatcctaaacactactgatgttcggtaatgcagacatgtttacatgctatttcttgttttaacaacatgaaaacaaaataaaaatgaactatgaactgatgacagtgtttgggagttgagctttttctgtggccaacgctgcttttaaaaacgttctatattaaggaagtgctgtgggaacactgctggccgtggaaaccgtcccacctccctgtgctccgaagccagccagcaggcagagtcctggctgggcacgagacgctcagggctcactcgaccccacggaaaccagagggaagcctaattttatcacgctgtatttagacggtgtggattcatttgaacaaggaagttcctagagttgttgagattttttttttttggtcaatgtttaaatactacttttttttcaagcttgccctagataccaactgtttatctaacacacaattccagtgttgccaagcctcatgccaatttgaagggaacagccaaaacttatgcattcatataaaaagagtctctaggctcttatatctacattataatttttatcctaatcacaaaactattccgaatggtagtgaacaaagtaattatttcaatcaagaaacataatggccagccacatctatgaccaaattgacctaagctttcagatgttttccaaaacatcggactgccacaggtaactttttacagggtcttcatataagttcctattttattattttattttattttattattttttgagacagagtctcactctgtcacccaggctggagcgcagtggcatgacctcggctcactgcaacctctgccttccaggttcaagcgattctcctgcctcagcctcccgagtagctgggattataagcacgcgccatgatgcgcagctgatttttctatttttagtagacacggggtttcaccctgttggccaggctggtctcgaactcctgacctcaagtgatcctcctgcctcagcctcccaaagtgttgggattacaggcgtgagccactgcacccagcccaagttcctcattttaaaagtggcagaggtttgtcaaaaagttaaacagagttaccgcgtgacccagcaactccatgcccaggtatgtgccccaaagaactgagaaaacagatactcaaacaaaaacgtgtacacgagtgttcccagcagcaccatccacaatagccaagaggcagaaacaaccctaatgtccatcaatggaagaatggaaaaacaaaatgtggtttatccatacaatggaattttatgcacccataacaaaaaggaggtactactccatgccacaacatgaatgaaccttggaaacatgctgagcgagagaatccagacacacaaagccacgtatcctacgattccaagtataagaaacgcccagactcggtaaatcctgcagatgcaaagtgcagcacagcggctgccaggtgctagggcttgggagctgggaagtggctgcttagtgggtgtagggtttccttctaggggtgatgaaaacgcttcggaattagacccaggggatggttgcacaacactgtgaatgtgcgatatgccactgaactgttcaccttaaaaatcattaagttatgtgaatttagcttcaattaaaaataaagcaggctgggtactgtggctcacgcctgtaatcccagcactccgggaggccgaggcgggcagatcatctgaagccaggagtacaaggccagcctggccaacatggtgaaaccctgtctctactaaaaatacaaaaaattagacaggtgtggtggcgggtgcctgtaatcaccggtacttgggaggctgaggcacgagaattgcctgaatccaggaaacggaggttgcagtgagctgagatcgtgccactgcactccggtctaggcaacagagcaagaccctgtctcaaaaaacaaacaaacaaaagaaccaagtaggaagaaatgtggccagttcctcctgggcagtgttgtacagaacacaccaaatttctacagtgactcctaccagacgtttcttgggaaagtaagcaaagtcctttcctgaaattctggtaaattttcataaaaatcaatacttccctaatttaacattcacattttagcttacagtataactagttatagaattgttcattaattctaattgactttcgattatacaatctaatatctaatttccattttctatttctagtacataagcaaaagaaatgcccttttggtcttatggaaaacgtgtcctatttaataagacacaaatttgattcaaatttctctttctcctcctcccccttaataatacactaaaaataactgtaataacatcttacacatcctgaacgcctgtacctagcaacctcacttactcagactatagctgacaactaaaaacctgcacaaaggctgactccttagccctttccatcaaacgatatctgcaggctgaacgagcttaattacttgttggtttggttttttaatgtaacgaagtaaaaaccaggagcaaatgtgatacaggaaagcacaccaacagctacatacatggatagcaaaagaagccaaaaaaattattttttaaaatgtaagaactggaaaaacagaatgatctcagtttttttaaaaaagcaaagattcctatttttatagagaaattgctatattagtaaaagccaaataacaagaggcaaaaataactgagtcatcaagaaaattacctcttatttggcacagtccatttttatgaaagtgctttatctatttcagaaacataaaatcaaatgtttgaattggttaaaacagaaaattatctgattgattaaaagagaaaatcctctgctcttcagaaaactcaaccatccagaaagtgctatcactgacatttatatctaacaacatggcaaatgaggttggtttcatattcaaccatttgctgtccccgaagctctctattaaggatctggctgatcagaaaacttaatatttaatcaacctagagcaggcctagaaaagaggctactgtttaaaaacaaacaactgattatataaaacatttacatcaaattataattcagtattaaatctcatggaatcacgcctttcaggaaaacgtctggacactagtgaaaatgaaatggctaaatctcaatcaaagtatattattaagtaataaaagattttatcattcaactttttttttgtctctacataaaaaaagtatttttgtctctacaaaaaatacaaaaattagtcagtcgtgttggcatgcgcctgcagtcccagctactcaggaggctgaagctggagaatatcacttgagcccaggaggcggaggctgcaatgagctgagatcacgtcactgcactccagcctgggcgacagagccagacgctgtctcaaaataattaattaattaattgtttaaaaaatcaaagaatagcttaaaattattactaagctaagaaccttgctgctattacttgttcaggaaagctccacacaccataggcagtggtgctaaatgcaacagaagccttagtgcgaactggaacttctcccaggagtctatggaattggaaacttaatagctactaaatacagtaacatcatgactggagctatgaaagcaaacatttccatttgaacttcaagtggcagaagggacaaagttgataccttagactcatcagccctgaaagtgttcctaatcacaatttctttcaggagccagaaagaacacagcgttaattatgttaatccagctgagacgttcactatgaaatgtgtgttagagaaaagtcctttgaaatttcttatttgcatggtagttctgaaagtttttaacctcctgcagttcctggcacacggagtcagtcactcacttgtcctcaggaagcacaggacagcagcaggttcggaatcacactttctctgtgtgatttcacaactcgggtctttgtccaggtgagattctcactcgggtcagagggcaaaggtatccaatgacaaccctgtccttcagaaccaagtagtgttttcccatcagccgtgcaaatcacagcaaatgtcatgtggctttccagcagcctctttgctgtttgttgaggaaggataagaaaaccatggaggattaaaatcaccacattcaaattactataaagaaaaggaggccaggcgctgtggctcacgcccgtaatcctagcactttgggaggccaaagtgggacgatcgctcgaggccccgcaacacagcaagacccccatctctaataagaaaaaaaaaagggagaagaaagaaaaggaaaaatgcagacaagccagaaaataaaattgaggagattaatacaatataataatcaggcactgcagatcacacctggaacaccgcctcacccaggcaaaggaggaaaagctttcatgtgtgctcatcatttgagcaaaaaggaagaaaacacacacagaaactcaggagatccagaagagacactctgaacaaagaaaatggaaatgacagggaaccaaatgatccacatcagggattttaagagggaaattatgcttctgaatgaaaaaaataaaatcattcaaaactttttataaatctttgacaaaatccaagagtttcctttcaatgttgatgacatttaatttttttttttttttttttgagacagtctctgtcacctaggctggagtgcaatggcgcaatctcagctcactgcaacctctacttaccaggttcaagcgattctcctgtctcagcctctgagtaactgggattacaggtgcgcaccaccatgcccggctaatttttgtatttttagtagagacagggtttcggacgttggccaggctgatctcgaactcctgatctcaggtgatccacatgcctcagcctcccaaagtgctgcgattacaggcgtgagccaccgcgcccagccctctaatttctaattacaacatctaaggtagacactttccagatgcattaatgtgggggacaactagaggactaacacgtccccttgcacactcaatatagggccagtagatccagaagctcaccgtcaagagcaacaagagcaagcaagtccttcctcaacagaatcatcggtaagaacactgtcagtccaggattcactcagtcctacgagtgaaaaacttgccaacacagtgaaattcattttactggcaactaaccttccaatctctctctaaaataatgttcacatgggaactgaagcacattaaaaaaataataattattcacttcacattttctccaagccatttcaaaagtgtttctcagactttcaaaatcaaacaggattcccagaccaggcaccatgggtcacgcctgtaatcacagcactttaggaggccaaggcagctggattgcttgagctcaggagttcaagaccagcctgggcaacatgatgaaaccccatctctacaaaatacacaaaaattagacgggcatgatgttgcatgactatagtcccagctactcgagaggctgaggcacaagactcacttgaacccaggaggcggagtttgcagtgagctgagatcacgccactgcactctaccctgggtgacagagcaagactctatctcaaaaaaaaaaaaaaaaaaaaaatcaaatggggttcctctaacgataccctgctttattcaggaaacgtgatcctcaggaaaccatgtgtaaattatacttctagaactcaatcttacgtatttatatttaaaggaagtaaagaatcttttatgaagttacaaatctcacacacgccctgcaatttagtggctctataaatcggagcttccctatgctaaatgtgtctaaatgagagttcgtagttgaaacaagaggacaaagaaaaaaacacttttcaaattaagaatgagcactatgtcccaatcacgtgagaatctcagctatacttagacaatggtggagattttaagcatatctatctcaaactttatattttaccaatatgaaaaaagcagaaccagagagattaaattatttgcccaaaagtgcttgttagtggaggaaatgtattaagaccaaaagctaatttacaaaaacaaattaaattttcaaataagatcatgctataaaagtgcttccctttcagaaaccaccctcaccacacccagtttttaggcagctcattcacacacacaaaaatcacattaatgaacatcagaagcagtggcctttccttatgggaaaaagaactcatttatgaagttccagaatgcgatgcaatccacactttaaatagtaacacaatagggtacgaactaactgaatcaacatgcaataaacactttcacttaaagtgtcatagccttaatggtatattgcatttaatatccatacacaaggaaataaatcacacgcatgtggggtttcttcctttctccaggctagagtgttagaaaatgtagttaatatttcccaaacaactcaaacacgaaaataaatgattcaaaagctgctttttccccgctttggaagggggaaaaaaaaaagaacagattttaatagcattacataaaaatcctggaaattatgcacaaagactaccctggagctttgccagaaacaggcatgctggttttccatgtgtataaatggtaatcaaataagaattaccaggagctacaatattattaagataaatatacttcttgaaatctccatcttacaaagcttaaaaacaattgccagaactaggccgttcaaccccacatttcctgggcctcccctaagcactcagtcctctgtgtttctgccctgcgccccacgccctcagcgcagcacctcggagcccacagtcccaagctgtccacactctggcgcccctgggcccattcacattcccaggcaccatgcgctggtcagccctctcggccaccacctttgctagagcctatcaagaccctccggagcctctatttaatgaaccactcagtcattccagcaaagcggttactgcctttcctctacctggaggcttgttctgtgtagatgtttggggtgtggtttcacacataacagggtactcacatgtggagttacatatatatatatatatatatatatatatatatatacacacacacacactatatatatgtataaatacatatgtacatatatatatatatatatatatatattttttttttttttttttaagacagagtcttgctctgtcatccaggctggagtgcaggggcgcaatctcagcaacctccatctcctgggttcaagagattctcctgcctcagcttcccgagtagctgggattacaggtgcccaccaccatgcccagctgatttttgtatttttaatagagatggcatttctccacgttggccaggctgttcttgaactcctgacctcagctgatctgcctgccttggcctcccaaagtgctgggattacaggcatgagccaccataccaggcttatatttacttatttattcattcatttatcagcaaatattatcacacatatattatatgcctggctatattcccagcgctaggaacacagcaggaagtaaaacatggaaaattcctgctcttaagatgcattccagtggcgtggaaacagattataaacaaaattaagtcaaatacatatgatgcaagctggaaaagagagtggctggcccatagctccaggaggcactgttgaaagcaaggctcctactaagggaattcctggagttgggccttctggaatgttccacagcggtcctgagggatggggtttgctgggctgggggaggactcctcagtctgcaaacatgtcatctacgttttggtttgggattttttgttttgttttgtttttgtttttggtttttttttttgagacagaatctcactctgtcacccaggctggaatgtagtggtgcaatctcagcaacctctgcctcccgggttcaagtgattctcctgtctcaatttcccgagtagctgggactacaggtgcacgccaccaagcccggctaatttttgtatttttagtagagatggggtttcaccatgttggccaggttggtctcaaactcccgacctcaggtgatccgcccgcctcggccttccaaagtgctgggattacaggcatgagccactgtgtctggcctgtaatattcattcatttattcattcattcattcagccaatattatcaggcatgtattatatgcctggctatattcccagcactaggaacacagcaggaagtaaaacatggaaaattcctgctcttaagatacattccagtggcgtggaaacagattataaacaaaataagtcaaatacatatgatgcaagatggaaaagagagtggccggcccatcgttccaggaggcactgttgagagcaaggctcctactaagggatttcctagagttgggccttctagaacattccgcagctgtcctgggggatggagtttgctgcaggactcctcagtctgcaaacaggtcatctacattttggtttgggatttttttttattgttttggttttgttttgttttgctttgttttgtttttggagacagagttctcaccgtgtcacccaggctggagtgcagtggtgtgatctcagctcactgcaacctctgcctcccaggttgaaacaattctcctgcctcagtttcccgagtagctgggattacaggtgtgcgccacgacacccggctaatttttgtatttccagtacagacagggtttccccatgttggccaggctggtctcaaactcctgacctcaagtgatccacccgcctcagcttcccaaagtgctgggattacagacgtgaaccaccacgcccggcctttttattgtttttttatcacgatttacctacattcacagacacctgcccctcaacaggcattagtgggaagatacagaaagaaattctacattgctctcaattgtaggaatgcaaattaaagcttccaaggaactcgaagatgcacaaaccgtttcttgggtggcattatttcctcatagaaacatgcatatactattcattttcttttcaaaaaagatgagggtaaactttagctcagtctctctgaataaacatatcagacaaacagaattaatgagattttaatacctataatttctcaactctttaaaaaggttactaaaagggtatgaaagttatcaaagaccactggggttgcatgaagaggactcagcagccaacttaaaggggctcccatgggccccaaatgggacaatctgagcatcaaaaatcatgtatctgtaatggaatgaaatacatcaaataagctaaaatccaagagtttatattgattcttgaaaaaaatcacctttggaggacgttaagaaaccatctcagctgggtgccttggctcacgcctgtaatcccaacacttcgggaggccaaggcaggaggatggcttgagcccaggagtttgagaccagcctaggcaacatggcaagaccctgtctctctcaaaaatttgaaaaaatcagctgggcgtggtggtgcacatgtgcagtcacagggaggctgaggtacgaggagcacttgaccctgggaggttgatatagtttagctctgtgtccccacccaaatctcatcttgaattgtaatccccatgtgtcgagggagggacctggtgggaggggactagatcatgggggtggtttcccccatgctgttctcgtgagagtgagggagttctcacgagacctgatggtttaaaagtggcagttcccccttcgcatgctctctctctcactctctctctctcctgacaccatttaagatgcgccttgtttctccttcatcttctgccatgattgtaagtttcctgacgcctccccagccatgcagaactgtgccaattaaacctgctttctttataaattactcagtctcaggtagcatcttttttgtttgtttgtttctgagatggggtctcactctgttgcccaggctggagtacagtggcgcgatctgggctcactgcaacctccaccttctaggttccagcgattctcctgcctcagcctcccaagtagctgaaattagaggcgtatgccaccacgcctggctaattttttgtatttttagtagacacggggttttgccatgtcggacaggctggtctcgaactcctgagctcaagtgatccgcccgcctcagcctccgaaagtgctgggattacaggcgtgagccatgcacctggcctcaggtagcaactttatagcagtgttagaatggtctgatacaggtggaagctacagtgagccgagattatgccactgcactccaacctgggcaaaggagtgagactcttgtctcaaaaaaaaaaaaaaagaaaagaaaaaaacaaactcagtctgtaaatggtatagaaagggaaagaaccaagcaaataaaagcatctaaacacacacggctcccaggatcctaggatttcacagtggctgagacagcaggatacgtgagggcagggtacatgacagcagggtaaatgcagagagctaaagacaggtatcgttgttttggctgttgctgccactgctaagaaaattattccaactttcagtaacactagctcttctctactgacaggtattatgtgccaagaacttttctaagaacttgtattttctcatttaatcctcgcagcaattctgtgagatgggtactagtgttttctaatacagcctttgggtttaaatactggctccaccatttagtatccctttctggctgtgtgatcatcacaagttacctaacctctctgtgcttcagtcttctcatctataaaatagagatcatctcaaccctatctgtaatacagtcaggaagtctagtacaatatttgttcaggtgatttttttttttttttttgagacagagtcttgctctgtcacccaggctgagtacagtggtgcaatcacagctcactgcagcctcgaccacctgggctcaaacgatcctcccatctcagtctgccaagtagcttggaatacaggcacatgccaccatgcacggctaattatttattatttttagagacagggtctcactatgttgcccagactggtctcgagctcctggactcaagcgatcctcctaccttggccttccaaagtgctgggattatagacatgaccactgcacctggcctgtacagattatttgatcactgtctacttccctttctaggcgtcatgccccaagagggcaggggccacccctctatctccagaacctagtcctcgccttgccaatggtaggaacccattcaatatttaatgaataaacaaatgagtttacagtaggatacagtacagttgaaaaaaaccactctagttcaaaccacggccaatagctggagttgcacagctgaagatctgcttataattcctcaaccatcgaggggcccatcatcttaagaacctccaggctctggggaactgaagcagcctaggaacgagcctgctgaacccccgagggttttcagtaaagaggctgccaagttcggcagctagagtttaaccagggcgagctatcagtattttgtattttggacacttgccctttttattacgagaaactgacacaatcacagtccctagtgtgttctaggtttcggtactgaacgacacaagatgtgcgccagattgagcgcaggaagaaagaaacaccctttagtgcaatacgaaatgtgactcagccagcggggagcgttagttattgatggaatggctgtccaccatcgagtcactatgcaaataagtgcttttcttgcattatcccagttgattctcccaacgaccctctgacagagacaccatcattcctataaattgcagcgcccctaggtagcttgcccaaagtcccacagttaggaaaccatacaaccgagaattaagcccgaatgtatcagaaatcaaaatccaagcacccaaccattcaagggtgagcccttccaaaaaaaatttacagaaacaaagttgatggttgtttctttgtttgtttgtttgtttttgagatggagtttcgctcttgttgcccaggctagagagcagtggcatgatctcagctcaccgcaacctccgcctcctggattcaagcaattctcctacctcagccgcccgagtagctgggaccacaggcatgtgccaccatgcctggctaattttgtgtttttagtagagacggggtttctccatgttggtcaggctggtctcgaactcccgacctcaggtgatccgcccgcctcggcctcccaaagtactgggattacaggcgtgactcactgcgcccagccatgtgtttgttttttgaggcagagtctcgctctgtcgcccaggctggaatgcagtggtgccatctcggctcactgcagcctccgcctcccaggttcaagtgattctcctgcctcaacctcctgagtagctgggattacaggtgcccaccaccacgcctggctaattatagtatttttaggagagacggagcttcaccgtgttggccaggctggtctccaactcttgacctcaggtgatccacccacctcggcctcccaaagcgctggtattacaggcacgagccatggccagctcgaagttgatggtctttatcacacactttgaacatgagcaacaaagatttaccagaatcacaaaagatttttaaggattttgtaagaaaaggtcaatgtatgaactaaggtcacttgctatttccacaggcaatatgtaatgggtgtgacaactccaattggcgttgtttcacacacatgagaatgcgtgtttgggtggcacatacaaaaccctcagtcttcccatcttgcagcccagctagcgaagcagtactcaaagtgtgatccgcagatccctagaggtccttgaggcctttgcaaggcatctgtggagtctaaactatttgcacaatgacactaagacagcatttgccttcttcagtgttgacacttgcagtgacagtgcagaagaagccatgggtgaaactgctagtgcctgagcaggtcccgatgcagggaaaccaaactgcactagccctcagcttgtccttcactaccccacacttacgaaaggaaaggcagacagcttcacttaagaatgtccctgatgggccgggcatagtggctcacgcctgtaatcccagcattttgtgaggccgaggtagggagatcacctgaggtcaggagttcaagaccagcctggccaatatggcgaaaccccgtctctaccataaagacaaaaattagccgggcgtggtggcacacatctgtaaatcccagctacttgggaggctgaggcaggagaatcacttgaacccaggaggcggaggttgcagtgagccaagatcacaccactgcactccagcccgggcgacagagcgagactctgtcacaaaaacagaaaaaagaaaaaaaagaatgtcccagatgaagctgtcaacatgaatgattggttaaatcgcaagcttgagtaggtgtcttctgaatagtctgagtgatgaaatgagaagcacgcctacgacgacgctgctgcccatcaaagcacagcggtcctggagaaaagcagctgtgcagctgtttggattgcaagctgaactggccacctttttggtagcacattatttacacgtgacctacagacaaaccacggtcgttcaggcttgagtacgggcagaccattcctgggaatatgaatgagtctgtcgcttcaaggaaaataactgacagtatttgccgccaatgataaaaaattccagttttcaagtagagttttggaaaacttacatcagccactgtgatgaactcaacatcttcagactattagactttactgacgtcaacatgtggaagagctgcatcattcaagagaccaatattttccaaatgactagtgcatgacgttataaaatcacacctgggtaaaaacccaacagcatttaatataatagtgtacaaaaaaagataataaaatttcagattccatattgcaactaacatttaagaaactaccactcaaaataaaaaatcagcggggtgtggtggtgcatgcctgtagtcccagctacttggtaggccaaggcagaaggatcacttgagcccaggaggtcaaggctggagtgagctatggtagcaccactgcactccagcctgggtgacagagtaggaccccatctcagaaaaagaaaaagaaactactactcacttgttgaatgtttctacagaatcaaagaaaaatatccagaatcacataaaaaggctatgaaaatgctcttccaactaaagccagattttctacacatttttcaacatattgcaacaaattgaatgccaaagcggttaagaaaattcagcgaacacacttaaaagtgttttaacacggtagatttctgttgtgtacattttatcactcaaaaaacctcagccgtgggtcgggcgcagtggctaacatgctgaaaccctgtttctactaaaaatacaaaaaattagccgggtgtggtggtgcgtgcctgtaatcccagctactcgagaggctgaggcaggagaatcgcttgaacccaggaggcagaggttgcagtaagccgagatcgtgccactgcactccaatgtgggcaacaagagggaaaaaaatccaccaaaaaaaaaacaaaaaacttcaaccgtttattaatccagacattaaagagatttgcaaaaatgtatggcagtgccacccttctcatcaaattttttcattttacaaaatatagttacttttataaaaatgttacttacattaacatgcaatgggtgaaatgaattactattttgaaataaatttagaaaagatttttaagcttctcagtttgtttcaatttctaatactgtaaatatcaatagacaacctatataaataatgcacataagcctgggaaacatagggagacgtcatctctacaaataatttttaaaattaggccgggcatggtggctcacacctataatcccagcactttgagaggctgaggcgggcagatcacttgaggccaagattttgacaccagcctggccaacatggtcaaacaccatttctactaaaaatacaaaaaaaaaaaaattggccgggcatggtggcatgcatctgtaatcccagccacacgggagactgagacacgagaattccttgcacccaggaggcagaggttgcagtaagttaagatcacaccactgctctccagcctgggcaagagtgagactccgtctcaaaaaaaaaaaaaaaaaaaaattagttggatgtggtggcatgcgcctgtgtcctagctactgaagaggctgacatggaaggatcatctgagtgcaggaggtcgaggctgcagtgaactgtgactgcacactgtactccagcctgggcaacagaggaagaccctgtctcaaaaagaaaagaaaaaaaacctacagaaacaacaatttctactggattagaggaaggcatataagctaggtgcagctatccctgactgtcggggcccagcatttcaccctgtttcccagcttctgccctctaggtcacactactgccaccactactgctacaactcattctgcctccactgccaccagcagcctctagcgggtttgatgttcccacctatcccagaacattgagccttcccacttaactccgcagaaaggatgccaggaattttttacaagtgcaatgctagcaaaggctggggaaaatgagacaaaaaacctgatttccaagagcagacaagttttacaaggggcagtcttcttcgctgaagttgactaaaatttagccacgggttggcttggctggtgtggttcactgggtacatccacaagactacaagaatatcactgctgtctgcagtcttcccaggggaggaccaccctacccttggcccacaccacggatggcggccccacatccaccctctgatgcagcccagtcccttcccttctgttccgcggcagcaccggtgcctggccacttcccttgccagttcccttcctgtttcaaaaactctcatctcttcacaaaattccctccagggatgctagttcctgttggaaaaggtcttgaggtgtgtcacaggcaaagtacaaatgatatgcccagggccagatggatgacaggcccctaagctcagctagtccagagtcaggaggggacctgcagaattctaatggtgaatgattacactcttacagttttggaattccagcaaaaacaccaatactaaaatcaccaaccaagacaaagacgagacttacggcccacgcaggcttctgcacactctgtgcccagacatggacagattaatgtgggttggttggttggtttttttccaagattactattccacagcaaagtacataggcaacgctgaccaatatgcagaaacataattactatctcaccaagctggccagaagacaaaaatcttgaaacttcttgacttgctctaattgttccttctccatgtttcccttccttaggcattctacctgaaaagacagccctcccttccttcttcatcccattggcaattcagcaaaccttaaccttctcttgctttaccagaggttacttctactcgaaagcttgtcttcagaattaacagctgtgtccttgtcactgtaagccaggtctcaaagagcctgaacaaatggtcactgggggcagcttgagtgtcgactctactgctgttttctgtctcccaccccagctgtggaggggaactgtgtgcctcatctcatctctgccatttgctatctgagaggctgtatttccacgtgcataacagatcctgctcaagaatgcaggtcaaggctgggcgtggtggctcacgcctgtaatcccagccctttgggaggctgaggctggtggatcacctgaggtcaggagttcaagaccggcctggcctacatggtgaaaccccatctctactaaaaatacaaaaattagccgggcgtggtggcgcacacctgtaatcccagctatttgggaggctgaggcaggagaaccgcttgaacctgggaggcagaggttgcagtaagctgagatcacgccatggcattccagcctgggtgacacagccagactctgtctcaaaaaaaaaaaaaaaaaaaaaaaaaaaagaatgcagtgcaggtcaacacagaatttccaagcaaggagactgagctctgctaacgggttagcatcccagtggcaagggttgcaggcttaggtggggacaagctaacgggggaaggaaggggaacacctgagcatgcaactgaaccccaaaccaacacctggctagggttctgtcagctggcaggcccgtgctcagggttaatggggcgcccagatttccggcatgagacaggtgtttgtttgcagaggctaacgcatacagaatgcctccgtccactgtcggtctgtcggcccaccagacagggtctacataggaactcctctaaggcaaaggtctcgatcacagaggtggccaacaggtgacaatctgcccaaatgcataccagcgggtctcctccccaagttgctccacaagcataaagtttggctggggaaaaaagcttttttaatttctgcatctgacaatgtgatcactccctggtattcccctcttcagagatatgaccatgggtgtggatgagagcggaggagcatcttcattctgtcttcctaatatttacacgggaaaagaagatgcctgtagatattttctaacagtttcattttctgtctttgtgaccctgtatctatgacaggaaaagccaacagctcgagataacacgtctcaccattttttgcttgtggcccaaggcagaatacaacagccacggttccctcaggcctagcggtttcatcccaaatgctgtggaaggtccctcaccttaatcagaccgtttcttcattttttttttttttttttttttttttttttggcgacaaagtctcgccctatcgcccaggctggagtgcaatggcacgatctcggctcactgcaaactccacctcctgggttcgaacgattctcctgcctcagcttcccaagtggctgggactaaaggcgcctgcgaccacacccagccaatttttgcattttcagtagagacagggtttcaccatgttggtcaggctggtctcaaactcctgacctcctgatctgcccacctcggtctcccaaagtgctgggattacaggcatgagccaccacgcccggcccatttctccatatctttaataactgtccctcacacttttttttttttttttgagacagggtctcattcttgtcgcccaggctggagtgcaatggtgcaatcttggctcactgcaacctccgtctcccaggttcaagcaattctcctgcctcagcatcccgagtagctgggattacaggtacctgccaccacacctggttaatttttgtatttttagtaaatatggggtttcaccacgttggccaggctggtctcaaactcctgacctcaggtgatccgcctacctcggcctcccaaagtgttgagattacaggcatgagccaccatgcctggcccctcactttttagattatttccaaaatcctagcagtatgctaaaaattcctgcaaccttctcccagtgactggccaccctagataagatttctcacactcgtacaccccatctgctgtatccccttcctgctttatgtttgttcacaaaacactttttctattttacttatttatggtttgactcccctgttgtcccctctattagatctcccctatttgaaggcctggtttttgtttcttagagacagggtctcactctgtcgcccaggctggaatgcagtggtgcaatcacggctctctgcaacctcgacctcgtgggctccagcgatcctcctatattattgacttaaaaattcttgtcccctattacaagagcaggaattgttgtctgttttgtttacggctgtattgccagaacccagaaccgtgcctggcacggagtaaatgatttgctgaatgagtaagcaagccaggggttccgggcctctgtactctgcaagtccatcctgcattctccattcataccatagcaacttcaaaggcccctcacccattcctgactccacattgtcgccaagtcacttccagaaacttaaaatgccatttcccattcacatggtcaagcccttcccctcctgccagtcgtttgtttaaatctggcttgcagtcccatcaagctgctcttcctaatgccactcagatcccatcacctccatcactgctactgtaactttggattgggccaccatcacccctacctgggatttactcgacacctcattaatctctttccaacccacactcactagctctgaaagagtgaactttctaaaactgcaagtcagatcacctaagccccctgttgagtggttccctgacacctatggggtcaaatgcaaactccttcccacgctacccatggccttccttgtcctgatgaacaactaacaatcgtccgcccccacagagaagcacagggcccagccatacccacctctccgctctgccctggtgctcttctgtccacctggagagccacagcctgatctcaggacccagctccagcaggagccccctctaaagcgctccccactcccgaacatactccacaacatttttaactgtgagctcacggaggttgggaactattaacgcaggtcagacgcgccccaaagtggggccgagcccaagagggttcttggctttgcccaggaaataattcaagggtgagccggtggcaggaaagaaaacacctttattgaagaggcaggcagtgttatacggctccatgactgctcctgcagagctgggctttcccaaaggcggaaagtagcagctcagggcagttttgcaatcatacttatacctacttttttttttttttttttttttttttgagacgcagtctcgcctaggctgtcgcccaggctggagtgcagtggacatgatcacagctcactgcaacctccacctcctgggttcaagcgattcttctgcctcagcctcccgagcacctgggattacaggcgcacaccaccacaccaggctaatttttgtatttttagtagagacggggtttcactatattggccacactggtctccaactcatgaccacaggtgatccacccgccttggcctcccaaagtgctgggattacaggcatgagccactgcgcccagccttaccttatacctacttttaatttcctgtagagtaaaggtaggcttaggcagacacttctaggaaaagggtggtggcttttgggttgtcaggtcacggccatggaaagaggcagtaactccgggtgtggccatggcgacagtaaactaacaaggcacactggtgggcgtgccttgcagaacgctgcttctgccccatccctgtatcagctagtcctcaattcggtctggcatctgaaccccgcctctggagtcgagtcccacctcctacctcacgatcacggatcctgctccacgatcacggatcctgctccacatccacagtgccaggtgcacagtcagtgccaggggcacgacacagatttcagagtgaaggaatgtgcagaaatcatgaaactacccttctgcaaagcctgttcggataaatttgaatgagaggagcttccttctgtgctcccaggctagttctagaagccccttctcattctatggatgcccattcctgcagggccgctactggctgctttttaaccctgggatcagaaaagggggtaagagggaaaggctaatacacccagtattggggttttttttgtttttgttgttgttgttttttaagacagagttgctctgtcgcccaggctggtgtgcagtggcgcagcctcggctcactacaaccttctcttcccgggttcaaacaattctcctgcctcagcctcccgtaatacccaatattgtatagagaaaacatctgccaccagcccaaaggcagaggctaaaatcgatcttacatgtagataagcttaactatgtgtgtgaaagggtcttctacaaactgtgctgtcatctcaatttagctttgtaaggacagtttccaaaagggccaggaagttgtgtagacatactctattcctggagtcctatccacaaaggtttgtaaaatgagctcaagaaaacaaaatcgtggtctcagagaaagagctaaaggaaagaatatcacttttaaaaaatcagcagctaagctaagccttctatcttccctactccctacagtactaaaacttttataaatatacaatgtacacaaatgtcaagaaaagttaatttaccaaatttacactatttgaggtttaaaaaaaaaaaaacacaaactcactctagcattttttttttttggctctgtgtctgagacccctgatctacaaacttaaaaataaaactactcataaattcacaaaataggtattcaatgacttggcaatttccaaacatatttaataattacaccctcttcatttttgaaattcgagtaatacagcatacaaagtacagcttacaaaacgttctcattgtcctctgggccaacatatttaatttaacgtactgccgcccagctccaccgtcccacagtctccaaggacagagctcacaacacctgggccctaaaaatgccaaggtggcaagcagggggttacacccacagccccgtccactgacaccttcagactcaagagcgagtgccaccgccctaaacggaaagacactcatcacggcagcatctttcaagtgaacagaaagtgtagtttctgaccttgttaacatagtccttaaagtgctctaggttaggggaattctcgggtgaaaatagttttcgtctacatccataaaatcttcaacagcaaagttagtaaaataaagaaaaatcagaagaaagatgatgttcccttgccagagaacaaatacataaaagatacaggagctcagatcacaagccagagaaagagaatgccaactggacacataggatgatctcacaccaacgacctatgcaggccctacctcaaccactggacgtctctgactgacactattacttctgccgtctctgattgaaactattacttctgccatctctgattggaactattaattacttcttccgaggattccctttcctgaggcttttaactgtttaagtatgcagtgtgtggggaccacaaaatacaatacagcttcacaaaagcaggcttttaaaaaaaatcagtgttattttctctacatacttccacaacagatgttcccctcaatcctgaagattttagtaaaacataaggactgtttaaaaaggaggaagtgggggaagaaatgtagcagattacttaaaatctttctttttcgtcctacttattttaatatcattttccagatctcaaagacttttgtcctatattagaaaaaacaagcagcccagtaaaaacatcaagaatagcagtaaggagcttcaaaccagggaccaggcaccagatccaaacctgagaggatgagggaggggaataccagctctccggcaggtacgtttctcccttccaaatcacctggtggctggagaagctcaatatgaagctcttcacttaaggcaaatactatgataataaaatatccttaaacaaatgatggctgaaagctgaaaatgcaaactttttttaaaaaaaaaaaaagacctagataaaagacagtgtgtactcagaggtaagtaactccgtctaattctccagagacctgcaggactgcgccgacttcctatccctattttgaggataagcaaagtgaggcctagagaggagaaagattttattctccacgttttcgcaaaaagggcagagagaaacatttggatgggacttcagggtgaccaaatgaatgcaaaggcaatttccttaagtgctaaacagtgctgaatgctgaagggctccatacccttacattcaccggacgtgcccccacatttcagccaaccagtggttatgcacgttcaaagttctccttccttctaaaggtcgcgtctaggtcatctctgcacagcgtccctttctgcagtgtgaacagatctgtgatatttgacccgctgaaagaaaagtcacactgaccctgagatccccccatggtaaggcattctgagatacctgagctgtctgcagacactgaggctggaagcttttttttttaatttaatacaatcaggatcagggaggggggatgccgaggtaaagcagtgcacatacctttcaactggtcagcaaccacgctctggcccagccgttcaataactttcccatcttccatttcgtaccggtcatctaagtattttgcggtggcctcagaaatgtgaactttgccggccactcccagctgctccatgagattggccaggttcacatcgttggaccacacgtcaaatttaaacctcctcatgcccaggatgccgcaaaggacggtgcccgtgtgcaccccgactctcatgttcaccatctccttcttctcctggcagaactgctcgatggccttgatcatgcccaggcccatctcgatgcagcagtaggcatggtcggcccggggctcgggacagcccgccacgcagtagtaacagtctcccagggtgctgattttctcacacttggtctcctcacacaggcggtcgaagcgaccgaacagatcgttcaggagacccaccagggcgtgggcagacttgttggcactcatcttggtgaagcccacgatatctgcaaataaaatactgacttcttcgatctgctgcatcttaaaagggcggaaggctataggagctttttggatggaagactttttcttcctgttcttggggctcgaggtggcatgcctcttgacagaattctcactctcctcatctccctgcttcattaagtcatcggctatgattcttggcatcacggaatgaatcatcctctctttgagggctttttccacttccaggtccttcccgtgcataatggattgccccaccttgaggaaggtgctcctggacctcacctgggacatgacgaacaggtggaccccgatggcgtggatgcagccgtggagcagccccctgctcagcagctcccagtgcagggccccggctccgggcgaggggaagcaggcttcatcccggaaatggtagccaaaggtctcgaaaaggacagagtaggccacccccagacacaaactcaggtacaaaggtaagtgcatgacggtatagagcaaaaagagcacttcgatgcacatggagaagctccccacttgagataagcaagtatctgtgggccgggctgtggccgtaaggttggagctgtcgccgcgtcctgagacaggcgtcaagacctggaactgcgcagccagggtcagggcgaacaccagcagggtgagagccagcgaggtccacgcgtaatgccgggcgtacagcttggtgaaggtaaacagaaagaagcccacacacaccaggaggaagcacagcgcgggggcgaccatgacgatcagtctggatctcatgtggaccgcaaaatagatgctccacagaaggcaggcgaagccgatgtagaagagcgcataccggaaccggcgctgggtctgcgggaagcagcgctccaggcaggcctcctccaggttcaccgagtcgaacttggggtcccaccagcggctggaggccctctcgaacagctggggcagcttcttctgcctgcgcagccggcctccgccgcccactcgccgggggacgcccccggagtccccagagctgctgcagctagaggagatgctgtatttgcagtgcttggggtggctgttggaggacagctgcttggggttgatcttgacgcgcacgctgttgctgtccccgctggagtcgcagctcacctcggtgctgtggtgatgcagcagctgctggtggggtggggaagccatgttgtcgagtcccggggcctgccccggccggggtcaccagtacctgccagcaaaacggggagagttagcggcgctcccacctaggcatgcacgcctagaggcccgggacctgctcctgtcctaaggggcggctccagcacgcgacctggacaggcaccatctgttcctgtggttcccggctcagcggtgctcccaccgcccccaccgcccccaccttcgaggcgcacgagaaccgctcgggacggacctagaacgcccgggggtccccgccgcgtggccgccgtggctccgggaccgctttgctcgctcgccttccgcgcctctcgccccgagggtggcctccgcgccgcgcggcttctcctcctcgcgcgctcgcctcctccagctgcggctccggagggaagttcagaccttgagcgctcccagccccgcgagccgcctgcgcacaaacaactccgctggcggcgcggagccctccatcctgcaggagccgcgctccgatgcgtcaaaggcggcgcgcggccggccccgggcccggaccccgacccggagcagcgagcttcggcgggcgcccccggctcgcgctccccggccgccccccgcgctccgggccggccctgcccgcggcggcgggcgctgggggtgggggcgccccgggctgcgagtgcgcggagcccgtcggcgcggcccgtctagtggggcctgcttccccccgagtgcgccgccgctcccgccgcggccgcagctgtcccgggaccgagcgcgtggaaccacggacgcgggcccctcgccgggcggcggtgcagacgctgccgcagagccgggctcccgcgacgccggccgggacgcccgcccgcccgcgcccacgccgggggccgcctccccgagctagagatgcggccgccgccgcgcccgccgccgtgtcccccgcggccgctgcctcatgtcggaagagctgccgccgccaccatctccggcccctgccccgcccgctgtcactgacagacgcgcgcccgcgccgcccctcgcccagccgcagcgcgcacgcgcggcccgcgctcgccgccaccgcctcctggccccggacacgcgcacgggccgcgcgccgccccgccttggtgcgcgcgctgggctggggctgcggggcggggcggggcggggcggggcgcgcgctcggctccgccccccgccccgggcggcgccgcttctaggcggcgggctgtggccgctgtccgcgctccgggcgctgtgggcccgccctccctcggcgtcccagaggccgcgcgccgcccggggtcccgaccctgcggagagacctgaaggcgcctgccgtggaagaagccgctggccgcaacgtttgggaaatcaaaatgttgccttcccactcggcacgcctttgggataaatcgaagtttccaaccgttggatttccctcccgggaggctccccttgctctgtaagcaatgaatgcgggccccggggcactcggcctgccctggacctgctcacggggcgaccttcacgggcctagcctccaaagctgggcccaccgacgaccacgttcccccgccccaggggtagtttaccttgctgtccttgagcccttctccccctcctcatgaactactgcttttccttttacacaaatgagactttcaaaggagtccgcgtcccataatggcagttgtgcattggcctccataaacattgccacgtgtaaataaaatcctattctctctagcatgcagatcccgaccccttctccccacactccacagtgcctcctgccagtcacggggctctcttccatcccctccctcgcctcccaggcccagcgccggggcccacaccaggtctcactgttgaattagaaaataaaagtaaaatgtgatctgtccatgcaatggaatattattcggctacaaaaaggaatggagcaccgatgcatgctgcagtgtggaggaacccgggaaacgttatgctagtgaaagaagccaaacaaaaaaggccacatagcgtatgattccatccagatgaaatgtctcgaattggcaaatccgtagaggcgacacagattggaggttgccaggtgctaggggaggaagataagcagcttggggtttcgttttaggatgatgaaaaagtctagaaatgatccaacaggatgaatctacatactgcccttgaatcatacactttaaagtggtttaggccgggagcggtggctcacgcctgtaatcccagcactttgggaggccgaggtgggcggatcacctgaggtcgggagttcgagaccagcctgaccaacacggagaaaccccatctctactaaaaatacaaaaattagccggacgtggtggcacatgcctgtaatcccagctactcgagaggccgaggcaggagaattgcttgaacccgggaggcggaggttgtggtgagctgagttcgcaccattacactccagcctgggcaacaagagtgaaactccatctcaaaaaataataataaaataaaataaagtggtttaaatggtaaatgttatgttgagtgtattttaccacaataaaggaggaaaaaactaaaagcaacatattgtggtggtattcctgcagaagtgtgtaatctcaatccaatcgcaagaaaacaccagacaaacccagattgagacctgttctacaaagtgattaaccagtacccatcaaaagtgtccttggacactttgggtcttgaaagacaaagactgagaaactgtcacaatctaggaatcgtccctaaggggatagatacaacaactaaatggaacatgggatgctggttgggaacatggaacaggaaaggacagtagcaggagagcgggcaaaattcacataagatctgcaatttcctggttctgatcctcttactatggttaggtaagacgttaacatttttaggggaagctgggccctgtgcagtggctcacacctgtaatcccagcactttgggaggctgaggcagacagaccacctgaggttaggagttcaagaccagcctggccagcatggtgaaacccccgtctctactaaaaatacagaaattagttgggcatggtggtgtgcgcctgtaatcccagctactcaggaggctgaggcacaagaatcacttgaatccaggagacggagtttgcagtgaaccgagatcatgccactgcactccagcctgggcaacagagcaggactccatcttgggggaaaaaaaattaggggaagctggatgtaggatacagggaaactcgctagtatttctgcaactcttcaagtctaaaactatttcaaaataagtttatctaaaaatttaaaaaataaacctttaatgaacatcaattctatgccaggcactctcacatacgaggttcagaaacgcatggtgtgtcacatgcattcgcttagtaaatgggataacaatagtgaactaacattgaccgaacacgtcataaatgccagaaactactggacattttcacctgtgacacatttggtcattgccacaaccctctgaggtagatactattgtcccttgtttagagaggtgaaacccaggattgaagagaaacgcaccctaggtctcccactaagggtgatgagttcagatggaaaaccaggtctcagaattctgaggccatgacgccttgtgtgaccctggcactaccctctgcaagcctcacgatggcccagcacagactgtacctgtctcatccatcagcccaactggatgggaggccctcagagccaggactcacagcttccgtcttcccttgctggctgcaacgctgtgctccctgcttcctggtttcctgaaacgatctgaaagcttgcctgtctgcacttctttcctcctccctaaatcatttgtggtaacttatgtgtttgtaagttagtcacgtcggatttttagacacaagtaatggtcatactcacctccctacttctctggaagcaattcggccacattgcctgctgtggaaacctataagctgacaagcctccccagtctccaggtcagggagtgaatcatgccatcaaccccgggggactggggctgtggtgccagcactgtgtgtcaggccctggaggtacaaggatatgccatccatatcttttcttttcttttctttttttttttttttgagacggagtctcgctttgtcacccagactagagtgcaatggtgcgatctcggatcactgcaacctttgcctcccggggttcaagcaattctcctacctcagcctccagtggagctgggattaccaccatgcccagctgatttttgtatttttagtagagacagggtttcaccatattggccaggctggtctcgaactcctgacctcatgattcacatgccttggcctcccaaaagtgctgggattacaggcgtgagccaccgtgcccagccgccatctgtttctttaaggggcttaggaacgatgtccaggggaggggttgggttaagaagatgggatcaattaggctttctgaaggattggatgtgaaggagagttctataaaggaggttaaccatcttctcataatgccaagacccaaagggaagtcactggagggttctgggttcttcttgacctcccagaagcataaaggtacccgattcacagaagatacggggcagatgcaatagctttcttcaaacatccaatccagggtgctgccaaatccacagagagtttcttttttccatctgtgatgtgtacagaactcccacctggacacagtgggaatcagaatgtgtccatgaaaactctgcaaaagcttgcagaatgccttgcctgcctcagtgtctcctcctcaccctccctcacatgcaaattcacatgatgggtgaggaccttggctccaggatatcagaggtcagactgggtggcaaccatgacaggctttgagataagttgcataatgattgagttgtagccattctcatcacaccggcccctgaggactcggcagtgcctacgtgatttcatttgtcaggtggaccacaatcttggagaaccatctgctggaagatgggattccctgctatggcctgatcatgcgtccaaaactgcagttacaagctttgagtctttttctctttcaactgatgagggtgagtttgtaggaacgtacctgcttttttttttttttttttttttttttttttgagatggagtctcactctgtcacccaggctagagtgtagtagcatgatctcagctcactgcaacttccatttcccaggttcaggcaattgtcctgcctcagcctcccaagtagctgagactatgagcatatgccaccacacccagctaatttttgtatttttagtagaggcagggtttcaccatgttggccaggctggtcttgaactcctgacctcaagtgatcctcctgcctcggcctcccaaagtgctgggattatagatgtgagccacacgcttggcctttacccacattttttctctaccattgactgctgttcacaagcctccagcagctaccttcacattgacaggaagatcaggcgtctcagcaaagcaaaagatcctttggagaagatcaccaaaatacctgcaggtgcctccataaccaggtgtattccatctagccacatccatagattctacatccagccatgcccagtttagaggccaatacaaattcattgaatgactgcatatgggagttatattaatatatttttatttttttttaatgggttcaaccaggaggcggagcttgcaatgagccgagatctcgccactgcactccagcctgggcgacagagactccacctcaaaaaaaaaaaaaaaaaaaggtttcaagaaattctcctgcctcagtctccaagtagctgggaatataggcatgcgcccacacacccagctaatttttgtatttttagtagagacaaggtttcaccatgttggccaggctggtctcaaactcctgacttcaagtgatccacctgtctccgcctcccaaagtgctgggattacaggtgtgagcacccagctggcaatcacattttaaggcaaggaggtgccgattggtggccccaacaagatgagcttggttgaaagagcagatgggagattcgaagtaaagcatggtgtctgtcactcagctttgtcacctggcacagctcctgctggagcttccatcccatctgtgtggaataatggtgaggagcccaggattgggtgtaggaaaaactctgcaggagctgtgaagtgggttgaacggagtcccctcaaaattcaggtccaccaggatcctcagaatgtggccttatttggaaatgggcttttgcacacataattagttaagaaacagttgtactggaccacgatggcctaaatctgatgactggcatcattttaagaagaggaaccgggcacagtggctcatgcctataaccccaaggctttgggaggccaagacaggaggatcacttgagcccaagagttggagaccaacccagacaacagagtgagccctgcgcttttttttttttttaatttgagatgaggccttgctctgttgcccaggctggagcgcagtggcgtgatcttggctcacggcaacgtcctcctcccaggctcaagtgatccctccacctcagcctcctgagcagctgggaccacaggcaggcaccaccatgcctggctaatttttgtatttttagagagatggcgttttgccatgtcacctaggctggtctcaaactcctggattaaagcaatccacctgccttggcctcccagagtgctggaattacaggtatgagccactgcacccagcccaaaaatgttttttaaaaattagctaggtgtggtggcacgcacctgtggtcctagctactgagaaggtccaggtgggaagatcgcttaaccccaggagttcaaggctgcagtgagttgtgattccgccactgtattccagcctgggcaccctgtctcaaaataaaaaattaaagttaaggccagcgcggtggctcacgcctgtaatcccggcactttaggaggccagggcggctggatcacgaggtcaggagatcgagaccatcctggctaacacggtgaaacccatctctactaaaaatacaaaaaaattagcagagcatggtggcaggcgcctgtagtcccagctacttaagaggctgaggcaggagaatggtgtgaacccgggaagtggtgattgcagtgagctgagatcccgccactgcactccagcctggggaacagagtgagactccgtctcaaaaaaaaaaaaaaaaattaaagttaaaaaaagaaaaagaagaggaaaagacacagagacatgcaggggaggagaagacagataagacaagacagaagacatataaagacagaggcagagataagagtgatgcagccaccagccacggaaccccaagcggtcctgggagactccagaggctgacagaggcaaggcaggatcctgccctagaaccttcaaaagaagcgtggctccacggacactttgatttcacacttctggcctctagaaccatgagaaagcgaaataagagagatggggccaggcacagtggctcacgcctgtaatcccagcactttgggaggccgaggcgggtggatcatctcaagtcaagagtctgagagcagcctggccaacatggagaaaccccatctctactaaaaagataaaaattagccaggcgtggtggtcggcacccgtaatctcagctactagggaggctgaggcaggagaatcacttgagcccgggaggcggagattgcaatgaactgagattgcactactgcactccagcctgggcaacagagcaagactctggctcaaaaaaaaaaaaaaagggagtaatggaattttcttgtctctacaagaaaatgagaagaacagcccaagaaacccagcatccaaataataaagggtttcagaaagaagagagaacacagaagggagaaactgctgagcaaccattcaagaaacgttttcctaaatgaagaatgtgattgaaaaggaccagcaagtggccaacacgatgactggaaacagacccacaccaagacacagcgcagcgcaacttcagaactacagagagctacagggagaagctccggcaagaaaaagcaggtttcaaacagagtgtggagaatgaggatgacacctagatgcaaccatctggggatggggaaggggcgcagacaggcatgtaaatctcccagggtgattctcgtaatcacgtgttgtttagaataatcaggccaggtcattttgtcggggatcccacccccgtgtcaccatctgctggtatttttccttggattaattagtcaggttttccagagaagacccttcaggcttgctgccactcagctgagaggggcagaaggctggaagtctcagccttcagtatcaaaaccttcgctcagcaaaccatccgtagggatagtttcaatcctattggcgtgctgccaacccttaccctgaagtcctatggcagtcacttgcagatggggctggatctaccatgatgaacctgaacttcctcggaagcatgcttctgtagccagcatgggagaaacttgcaggcttgttaggaagatgcgtgtttattttagccacggggtagtaccaaaataccattaacattactcaaaaataagtttgccggctgtgggcggtggctcatgcctgtaatctcagcactttgggaggccgaggagggcagatcgcctgaggtcgttagttcaagaccaacctggccaacatgatgaaacccccatgtctcctaaaaataactaaaaatacaaaaattaggggggcgtggtggtgcacacctgtaatcccagctactcaggaggctgaggcaggataattacttgaacctaggaggcgaaggctgcagtgagccgagatcacacctctgcactccagccttggtgacaaagggagaccccatctcaaaaacacataaaataagtttgtgagccagacaaatatgatcgcaatgccaatagataataattttttttcaaacagaaaaactccaggagaagccaggcatggtggctcatgcctgtaatcccaacactttgggaggccgaggcaggaggattgcttgatcccaggaattccagaccagcctgggcaacatgatgagatcctgtctctacaaaaaatttaaaaatcacctggtcatggtggcatatgcctgcagtctcagctgctcaggaggctgaggtaggaggatcgcttgagcccgggaggtagaggctacagtgagctgtgattgcatcactgcactccagcctgggtgacagagcgagaccttgtctcaaagaatacaaataaaatcaataactaataaaagtcttattgctctcggtagccataagcttacggttttctaggaatcatgttttcatttggaacagcacccacgtactctcagacacagccatgagcagctatccaggaggaggagacagtggatccgcattctgtattctctctgggtccctccccatcttggggtggtgaggcatggctcttctttggcaatttatagtgttgctgagagacacacacactgctggaataaatcactgggcgtctatgctgtgaattgagccccgaggagcgtgtggttaatggaccttacttcaacactctggtctgtctgagagaagcgttctctcttcccagcatgtagtgggttccagggaggaggtgagcaggggcaggaggtggaagctggatggcttcccagcttctccagggccaggtcttcattagtgtggcttcattattgcatgtgcagtgctttcccagaatatctgacacatccatgctcaaatgtaagtacagaaacgaatccgtaaggcaggtaggagttactaccaactttctgcaagggcaccatttgacccctttgcccttcgtaacctagggcacacatcgtctcatttggagggaacctgaaggccatcacagctggaaatgaaaccgagagtatctcacagtagccccaaatccaagcctcgttctaaatctccaaaggcctaggggatttggggccttgacgggaaaaatcaatccccctgcatcataccaccacgcccaggcactggctgcttcactgtagctcgctctggctcagttcatgggagccgtggaaggagaggtgtgggtctctgggttcccactgtgttgagacaatctattcttactccaaagagctattcaggccaaaaagagttgactagggcttgcaaggtctataacctttttctagtcaacctaatgcttttttttctgagacggagtcctactctgtcacccaggctggagtgcagtggtgtgatctcggcttgctgcaacctctgcctcccaggttcaagtgattctcctacctcagcctcccgagtagctgggattacaggtgtgcgccaccacgtctggctaatttttgtatttttagtagagatggggtttcatctctctcaaactcctgacctcaagtgatctgcccgcatcggccccccagagtgctgggattacaggcatgagccacaacgcccggccaacctaatgctttttgggccttaattccctgataaaaactggaactctacttttaggctatgtctacagtactttagagactatcaaaatagctttgtattgatgtcgaaaaaag

SEQ ID NO: 399 - DNA, 75042 bp, Homo sapiens
gagtgagtttctcccttatccctggggtccagccttgaacacctcaggggtgcaaacattttcctctctgcatctccaaacccaggctcagttaggagtgtaaaactcatgaatttgagttcttgagcagtgcacacacctttccctacctccggtgtgtctgttttgtaatgaaaaacacagagatctggctgggcgcagtgactcacacctgtaatcccaggactttggaaggccggggcaagtggatcacctgaattcaggagttcgagaccagcctgggcaacatggcaaaaccttgtctctaccaaaaatacaaaaaattagccaggggtggtggcgtgcaccacttggaaggctgaggcgggaggattgcttgaacccaagaggtggaagttgcagtgagctgagatcacaccactgcactccaacctgaatgatgacagagtgagaccctgtctcaaaaaaaaaaataaaaaaaaaaggagatccgttgattcataaccatgttttctgacgaagtaaatgcctaggtacccaggcacagtagcacaggacaactgtacctaaaatcacagtcctgctgggatgcaatgctaacacttttacaacacctcctaggtgtcagacattgtcataaagagctttcccttttatttattttttattatttattttgagatggagtcttgcactgtcgccggggctggagtgcaatgacgtgacctcggctcacggcaacatccaccttccgggttcaagcgattttcttgcatcagcctcctgagtagctcggattatagaagcccgccaccacacccagctaatttgttgcatttttagtagagacggggtttcactatgttgaccaggccggtcccaaactcctgacctcgtgatccgcccgcctcggtctcccagagtgctgggattatagacttgagccatcgcacctggctgctttacgtatattttaactcacatcctcaccacagtgtcaggaggttggtaccataattatccccactgacacctgggcacttcccaggttaagtatatcagaccccattgataaaactcttactatccaggacttactactacaaactgatgaccttcgcagagcatcttccaggcttgggagaacctatcttcatagcccagtatatgtgatgtgttgggcttgtacaaccattaagaaatattgaattaggccgggtacggtggctcaagcctgtaatcccagcactttgggaggccgaggcgggaggatcacctgaggttaggagttcgagaccagcctggccaacatggtgaaacatgtctctactaaaaatacaaaaattagccgggcgtggtggcaggagcctgtaatcccagctatttgggaagctgaggcaagagaatcatttgaacccgggaggcggagtttgcagtgagccgagaccgcgccattgcactccagcagcctgggcaacaagaacgaaactccgtctaaaacaacaacaaaaacagaaagactgaattagttgacatctaaacgcagatatggaattgcagaatctcaggtttacttgaataagatctgaaaatccggcaacatcgaggtagcatttcttctgaccgggatgggcattctcaactcccccacagtccccatctcttgtgattttttgccagtccttaagggatcccagttttatcccgctgaatgactcttggggaagcccgccattgccccctggtggaggagttcagaatttgcattttatctcccagcaaccattaaaggaagtggtgagcacatccaatcagagggatgcgaggcctagaaagcgaccaatcaaaagcgagaggggaccggaattcgaccaatgagggcagagagcgctcagaataaaataaattcttttattgagatgagagacggacacacactgggagggttttgttttttgttgttgatttttttgtgactgagtcccagtactcagggaggctcagactggaggcggcggagcaggcaggcggcggcaaggctggtcccctggcgctggggccgcgcatacttgaggaagactgcggcgcgacccggcgcgggacctcggagcgcagcgcgggccatgcacggctcgagggtgcccagttcctcggggctgcagcagggagatggagaaactgaggcagggcaagtggttggagatgacccatccttggaactggagactggaggctgagaagaagcgtcgatgtggttccccacggacgggtcgggggctctcttgagatcgggcacgcgtcccgtcttcaactggagtgactaggcgagcaccggggagaggtggacaccctattcttcctacagggcgcggctagtgcggagtcagaacactcgaggaagcaaggaggggagctgaggatgggcagccatcctctctatgctgggtgcacaggctgagggaaaccatggttcgccctgccacctggtagcatggttagcggccctagcagctaaaggaacaccccatccaccaccagatacagagatggaggactcgaggcctgggtgatccttcgttctcagccctggaaggcaataggagcatcttctgggcctgggagactatcttccactctggggcaaggttaagagaccccagatctggactaatggggtcctcccaccccattctctcccacacccagaaaaatcaagtctaggtgccacctcctcctcaataattgtctctcattctccgagaccgtaaaaatgaccaggaaggtaagtccctgaagctgcggtgaccccatacacttcctccgccaagactacacctgtaaagttctggctggagcctggagcccgccccgtcgagcaagcggtgcgccaggctcagagccgcagccgcacgacgacccggctcccatcccgccgcctcggcctccagcaaagacagctccaggaagtaggtggcaagtaacatcacctgcaagtgaggcggggcgactgtcaggccacgccccacttcgcgccggccacgcccccaccccgcgtattcacaagggctcacctgggggctgctccctgccagcgcggccagcagcccgaggcacagcagcgggccggggtggtgcagccggaaatccaggcggctcaggatgcgacgctcggcgcgcagcagctccgcccgtgagaaggagtccgcgctcaggaggcagaggaaggcgggctgcagatgggggatgcggggggaggtgaaggagtcttggatccgggctctttactccctgccctggaaaggccccaagttccggacctcagtttcctggtgtgtaaaatggggccattgacttgtgtctggaagtcgtagagagcacgggcttgagggtcctgggttcaagacctaggttcgagttcaaaccccatcatctgctcactgtgtgacataggacattcacttaagctctctgcctcagctaccccccgccccccgtaaaacagatactactccctgcttcaccaggcagttctgataaggcactgaattcatgcatgttgacggtaactattcaagatggactagtttatattatttttatttacttttctaaattagagacgaggtcaccttggctccccaaagtgatttgttttgtttttttttgttgttgttgtttgtttttttggagtgcagtagcgcgatctcacctcacagcaacctccgcctcctgggttcaagcaattatcctacttcagcctcctgagtagctgggcctacaggcgtgcaccaccacacctggctaatttttatatttttagtagagacagggtttcaccatgttggtcaggctggtctcaaactcctgatctcaagtgatctgccggtttcagccttccaaggtgctgagattacaggcgtgagccaccacccccagccttaagacagactattctagactgagtccaagttccaactgcttgatttggggcaaatgtcttcctctctctgagcctcggtctcctcttctgtttaagggacacattgacagcccctccctcatacatgttgggaatcccagactcagcacggtgcttggcacacagtagtcactgaatcagttactccccaaaggactccatccaccctcccaaaccccaccccggaagtacctcgggaagcacgcactcttccattttgcacgccacaaacaggcaagccacgcccagcagctgcaggcgatgtagacgcacgcggccagcgctcaggtaggaatcaagcaggtgaaccgccagataaagtgtgtcaccagccagacccaggtactcctgaggaggggcaagggtgaccacggggtcctgggcggcgacgcaaactcagccccccacacccttccagatacctacgtgcacctggaccagccagtctaccaccagggcgcgcatctccggggtcacagcgcggggcagggctctcaggggcagcacgcggcacacctggggttggggcagggacgcttcactctccacacctgtgcctctgcctttctcctgagctccagccctggatgcagcagcctcctccagtcagttggacatcttaggcatgccacacccaaactggcctccaaatgagctcctcttacgtgtcctcacctagaactctgggcttcgttccagatgcctccatacccacctctccgccacgtggactcctgggcgtctccctctaggttcccagacttcactttttttttttttttttgagacaaagtcactctgttgcccaggctggagtgcaatggcgcaatcttggctcactgcaacatccgcctcctgggttcaagcgattctcccgcctcagcctccctagtagctgggattacaggcatgtggcaccatgcccggctaatttttatatttttgtagagacggggtttcaccatgttgaccagactggtcttgaactcctgacctcaggtgatccgcccacctcagcctcccaaagtgctgggattacaggtatgagccactgcacccggcctcagacttcaactcttgaccacgaatcctcaacccctctgcctcagagcacccagaagcatcttcccaaagaaagatctgaccaaggaactccccagcttaaaacccttccatggctcccagtacccttggagaaaactctgatttctttcaggctctgctccagcatcacctcttccctctctctccccacaacccatgcgtcagccacagctgccttctttttagctcctagactataccaagcccattcctaccccaggccctttgcacttcctgtttcctctacagagagggtccttccccagccccttactcgacctttccgtcattcagctaacatctccatgactttgtctatactcctaccacccgatcactatctctttgtctcagcattttcactgtgaagatgtctccctgtgtgctttgtctatttggccgctaggctgccagtcccacgagggcagggacttctgcccacaacacaagtgtctctcaggtcctaacagagatcctggcccaggagagtcgcaggcaagacgttcaacaaactcctcccttcagtcttccttccgcagcaaccctctcatagggatatctgaaggctggcgaggccaatgttttggtttgcgtggcctttccctagttgttctatgtgtttgctcatctccccagaacgaggccagcattgcagcatctccagcacctaaaacatttgctactaaaccattaaatatttgttaaacaaataaatgtggaggacaagtacaggggaccataaacaccccaggagggactgcaaagagcccggggacggtgggaaagggcattcccagcggtagaaacggcgctgtgtgaaaacaaaacaaaagcctggacgttgcagggaaggaacgccggctgccagtgatagggaggagaggctggagcggtgggagttcagagtggtgttgagtgggtgccgggcggtgggccggcgtcgccctcaccagggcaggcggcgggtaggctcaccatgacttcggcgaagatgtccccggcgtactcgcgttctccctgcagccccagcgcgctcagcgcctcctccagccccggcggcctcgccaggcgtcttggggagacagtggggcccgcggggaagccgtcggggactgcggcgcttgaaggctctgcgtcgagggaggcagcgagactctgcaaaggagagggcctgggggcccagcgcctaacgataggcccgagccgggagccggacccctggtccctgcctctcaccagcatcctccaggagggtgttgcgggcgaggccaagcaccgacccttgcagctaggggaagagacgcgcggcgggcgctttaaaggcccctgggcgcgtgcgcactgagcccgcctcgcccgggcaggtgcacaaaggtgagtgccccgcaggctggctctgtcctctcgaagccctctaaggtcggacagctggagacagatcctcatcctgctgcccggaagcagcccctctgggcctcgctttcctgaccataaagtcgggatgatttcaaaatgtagaatcagggtttgcaccgtcagaggatggatgtacaaacatagatcggaggttagaatgacccttgtggtgtcggtgtcgcaatggaattggagataaaattgtgtgaacacatggttgtttacatagaagttaagtgttgtgtggccgggtgtggtggctcactcctgtaatcccagcactttgggaggccgaggcgggcggatcacgaggtcaggagatggagaccatcctggctaacactgtgaaaccccatctccactaaaaatacaaaaagttagctgggcgtggtgccgggagcctgtagtcccagctactcaggaggctgaggcaggagaatggcatgaaccctggaggcggaacttgcagtgagcgagattgggccactgtactccagcttgggcgacagagcgagactccgtctcaaaaaaaaaaaaattttttttaaaaagtggtgtgtatgcaaacatgtatttcctagcttaatccactgggagagcttaagagcagcgacaccccaatagtgagaagcacccctaacatccaaaccctggccgccacatcccattctccactaaaaggaaccagggctacctggagaaatggctgatcccagggtcatacaagagaaggtacaagatctggaatatttttgtgtggcagaaagtgtcccaacagcagggcaagtcacatagatgcagaagtcactagctaaatctagaaaatgtgagcatcaagatgatagtcatagatcacaaaccactgaataaaattaaaatacaagtttattctgatataactcaggcagtgggaaagaaaagctcttctaatctttagaaagtgaactaataaatgtgttttgttttcagacagggtctcgctctgtcacccaggctggagtgcagtggtgtgaacacggctcactgcagcctcaacctcctaggctcaagtgatcctcccatctcagcctcccaagtagctaggactacaggtgtgcgccatcatgcttggctaatttttaaatttttctgtagagactggggtatcactttgttgcctaggctggttttgaactcctgggttcaaggaatcctcccaccttggcttcccaaagtgctaggattacaggtgtgggccgccatgactggccgaactaataatgtagaaggttggaaaatcctatttggcaaccaccacagcatcgtttcatgcaagaaatatcaatagatgttcaaactagtgggtgaacatctgataggaatcgggatatctacaaaatgtctctacacaagatgtttattaactgtgtaaaccaaaaggtatctgagataggtgtcaatcaatttagaaagcttattttgccaaagttaagggtgtgcgtgtgacacggcctcaggaggtattcggggcacagcttggttttatacgttttatggagacatgagacgtcctcaatatgtgtaagctgtacattggttcggtccggaaaggcaagacaactcgaagcaggggagggggcttccaggtcatagacaggagacaaacggctgcattcttttgagtttgattagccttttactgaatgcacaatttacaggaagagccatccatgcctagtctgggtcaaacaataggacggaggaagccatcagatatgcattggtctcatgtgagcacagggatgactttgaactctgcctgtcttctgtccacaaggaatttccttgcgggcaaatggagagacgtaagtagctttaaaaaaaaatatatatatatatatatatcttttaggccaggcgcagtggctcacgcctgtaatcccagcactttgggaaggtgaggcaggcagatcacttgaggtaagttcgagaccagcctggccaacatagtgaaaccctgtctctactaaaaatacaaaaattagctgggtgtggtggtgggtgcctgtaatctcagctactggtgaggctgagacaggagaatcacttgaaccctggaggcagaggttgcagagagccaatatcgcaccatggcactccagcctgggcgatagagtgagactccgtcttaaaaaaaagagaaaaaaaaaaagtgaggcaaccaaccctggttgagggaaaataactgcaaaataactgccctgtgagtttcacacctgccaactgaatgcaacatgtgagcctggtcattagctaggaatttttaacatacaaggacattaagcgtgaccattagcgaacactataaaatctgtacagaagagcagtttcaatgttagcttcctgaccttggtaactggagagcagttatgtagcagaatgttctttaggacaggtatacaatgtggagcgggaggtggaggggtgaatttaacattctgatcccatttttgtccgttttaagtaaaatgctatgacgaacctggcgaagggtatattttgtaattcttctacataacttttttgaatagattgacagttcccacctaccccacacccaatttccccaatgaacatctcatattagtgtgccccatttgtcacaatccgttagaccaatattcatctattaagtccatgctttattcaagccttcctttttccctacgttctttttctatttcaggaaacattacatttagtcaccatgactcttttggttgatcttggatgtgtcactttctcagaattttctgattaaccaccttggcagacaaatccctcaactgagatctgtctgatgtctgcttcctctcagtgaggtggtgtgtgtctgcaagaggaggatcagagggaaagtgccattctatcacattaaagggacactgtgaaggtgattcatcagcagtgtttgcctcgattggctggatgatgtagtgtttgccagggaccttcactgaaaagttacttttccccctctccacactgcactctttggaggagtcactgcagcccacgcctaagaagtgggggttccatagccctccttgaaggctgtctacagaaattacttatgattttgtgtagatttgcatattctccccattttgccacttagcaatagacttatttcacattttaggtgaaaacccaatattatgctatttattttgttgttcaaattcttttcagctttggccactggaagctttctgttggctcctgtgtccctgtgacttaagcatatcagtgcgtgctttcaggcactgcaagatgccccaggctcatcttgtacatttcctgccccaggcctggaataatcttagtacagcactatttttgaaagttttctgcaagtctgcaattatttcaaaatttaaagtatctgaatggctacacttttttggaaaggtactggacattaaaatcctgggatgtagacaaacaaaagcaccagcacagtacagatggatagctagtttattacaggactgctggtagcaccaaacgaaaccaagtcaattcctgttaacggggcagctgaagcggttgaggggtctaccccatggaaccccaggaagcagctggaaagcctgagttccccccatgcagcagctaaaagggaatcgcactgccgcccccgactccacacaaccatcagtgcacgagggcagcccccagaggcttcacattaactggaaaagattacacaaaaagagcaggaaactaccaatttatgatgccgtgtccatttgcagagaggtaatcagcaccaaaatgagtactcaaggccctgcgacctcgggtgaatttcctttcttatactcctgctttgctgtcttttttaatagcatgtatcatgttttttttttttttatttttagagacacagtctcattgtcccaggctgcagtgcagtgccgcaatcatagctcactgcagcctcaaactcctgggctcaagtgatcttcccacctcacctcagccttccaagttagctgggattgcaggcatgcaccaccatgcccagctaatttttgtattttttgtagagatgaaggtctccctatgatgcccaggctggtctcgaacccctggcctcaagagacccgcccgcctcggcctcccaaattgctgggattacaggcatgagccactgtgcccagtcactgttctttatatacaaaaaagaatgtgtgaaatttttaaaatgtacattgcaaaagacgattattctactcaaaatttatttggtaagattttattaagactctaagttcaaacacccttcttgggaaaagctctacaggataaccacacatgctcaactacggggccagctgctgcagctgtgggaccccatcctgtggaagaggagagaggcactaaaaagatgaggtagccaggcctgtgcccacactacgagacctgcatcaccatggtgtgaggagcagcaacgtgggtcaactcggggctgggatgagatggaagagtaaaaggcctttcttcataggcctgcctattttatgaccaccagggtagacttttgtaattaaattaaggtccacatgactttagaaagacaaactaaaaaaccccaaccaaacgagtcctagctgtagctaactctgatttctgtaaattggatctgactttttctgcttacattcacttaaaatctcaaagactcaatgggtgtgaagtgctaacaccttgcggcaaaatctcaaattcatctgtgccaggccctctgcacagcagggctcagcagggcaggccagggctctggtccctggtcccttgctgggggaggtgttccatccggccagcgcccggccatgcagccacgtgactcaagcacgggaagtgcaggggcccagacacatccaggctaaagggcagtgactaggggagggctgaccccaagctgaacagggttctaaccaaacgctcaggagctcccaggtgacagcaaccacgccaccatgaacacaccactgggtctgtactggaatttgggggcctcaaggcttccaggtggcagcataaacagggaggtggggcaggataggaatgcccccctctgaggctcggcagccgggtggaatgaaccactccctctcattcagtgacagcacaggcaccctcctcattctgggctacccagatcttccagccctgtccctccaccccacctctcttagcctaagcagcactgagggcctggagtggtctctgtccaccccacccccacatgcggggagccttcccatacccctcagccccacagcaccagctccacccaccctctccagcctgagctcctgcacacaccccagctgccctcaccctgagctcagtgccctccttgctgaagggaacggctagtacaggaggagctggggcccaggggtctgactccatcaccaaggcaaagcccagagtggttgggctggcgtgagtgcaggctgggccctggtctgaaatgagtgtctttattgcttgtaccgtacaaatatgaagacgaggagaaaggccagtagggacggagaactgtcagataacaacatcgcacacagaggaaaaagaccctcacccacccgaaccaaccccacccctccccaccctgccatgaactgtgtagtacaggagatgggatagggagagcaaacccacaaaagctaaactccaaacacccagaggtgttgctacagggaggggaggcgtgggcagggcagctcatggatcacagtggggctcctcccactaggtcagcacccctcccccacaggatgaaatgctcgggccagggatggggcccaagcccacacaccatgcacactggaggacacgctgccctcacacaaacacacatgcacacacacccacgtgtgcctgcgtcccgccgacacacgcagtccgaggcacgcacaggagtcccacagcactgacatggacgtgcactcatgttcaaccttaaggctgcagaacgtggggccctggggagagggaggggtgaggggggcctaggagcctcccttttcagaggccccccaccccaataggtaccagagatgcccacccccacccctccctgaccaagtccatggggcccaatactgtccggtgtaagattgtaacagccaaggctggtggccctccacccccgcagaggagagggtgagcccagcccatagcccccagtggggccaggccaggcccagggtccagcgggaggtaaggccagctggaaggaagccctagtaaggcacggggctgggaggcaggcaggtttggccccaaatgttcctcctgcctcatccatagggtgaggacagtttggtggggaggaggccggaccaggaggcggcacccagcccggccactcctggttccccatggtacagatcctaggatctgactccattcaccagggagcagccctaacccccagccctgcagctcccaagggcccctgcctgcccctggacattattgcttttctgcccccatagggggacagcgggtgggggattggaccgccccgtgcctggccactccgagcctaggccacggggcctggaaggcagcaccactgtctgccgggtgtcgcgtcccaccagaaggcagccttcgtccagatgcagcagcgcggaggcagacaccagcacgacacccaggccagaaactcaggcaggccccaggcgccatgcttcacccctcactggggcttgtgtggattaaaacctgaatctccaaccgcccaacagcccaggcctgggcgggaggtggagtcttccaaatgcgagtctgggcacaaaggtgaggctggaggctggaggcaggggctgcaggggccgctggggtgcgtctgggaggggcctgaagaagaactggaaagggggtgaggaggtgggggtggggacacaaaccaaaaaggctaagtaaaaagttagggggaaaaaaccacccagcggtgatggcagcgagcgtgcgtcctctgcgtgggcagactgctcactcgcggatgctggccgagtaggagaactgggggaagtgggtccgctggtccagctccagtaagcccaggctgtcatctgtgggcggcagaggtggatggggaggaccagtcaggagagggcctgggacacctgcccagactccctggggaaacggccccagctggcgggggctgcccacaggacaggacaggaaaggcccatccctccgcaatggaggccctcagccacggacccactccccaaacctgagccccgggcggcctcctctgggagtttcctgtgcccttgcccatgcgccccacagctggcagggccttctgagcctcccaccttctctctgccccacacaccaccatgccagagtccagcccagagccctgtcctggcctgcctctcgcaccctcccatccattctccacgggcagccaggggggctttctaaaggcctgctttaaccctgtccctctctgtatgaaacccttccatggctggctcccgccatgcaagcagtccccacccctcccagtggcccccagacccttgcactccagccccatgccctctcttctcaccaccatctccctggctgctgccggtccttagctatgccatgcttctcccattgctggcatcccacacgtcattcctccggccagctgacacgtttgcttcctcctctagaaagccctccctaactgcaggccaggtcggatatttcctctgggattccccagtccctggcctcccacgccctagccctgaccactccaggccgcccaccctacctgggctgggagctttccagggcagggcccagggctggctcaatcagtgctgtgtccccagcatagcccagccctgggctgagttcagagtaagaacccaaacagctgtaaagcagtgaacccagccaggctcagggaccgggctgcctcctgccctgagccccccgactgagctccagaacgtgctgcagtcaatggctcctggtggcctcaccaggtccaaagaggaccaacagcaaaagggcctgagagcagacttggggaaatctcccagacatgaagcgggggccttcgagggccctccttgagaagtgagttaagagcagatcccatccctccacccctggggcaggcacaccagcgcgggggccccaggcactcacagcggtcagggggtgtgattgtgatggactgggcggtaaattcatcatcgaagtaccttgtgtcgacctcggacgtgacctgaggtttgaagggtggcaggagctacggaggagaggagctcaggctcagggaccctgaggccaggaggcctcaaccaaggtcaccacgagtgggccaggtccctgagggtcctgctggggcaagcagtggggctcaccttcttctggaccacgtcctgccagttgatgctgaggaagaacctgtgctccatgacctccttggcatcgctgggccccccaccaagcctgtgcagagacggccgtcagcacctgcctcccggagcagctgggttcgggcagacgggctttcggagcaggcaggccctgtatggcccttaatgattctgtcttgaccacaaaccacttcacagaggaggaaaccgaggctcagggagggagctcacgtgcccagggtcagagccagggagtcagcaacccggacccacgtgtcctcactgcctggccttaccctgagtccagaaagggagttagtagggcaggctccgttcctatcctggctctgccacatatggtttggtggccccagccaggcccaggggatgccctgttcctcagtgtccccataaaataaggcagtgtcaaggatgggcctgccctgggggaagcactccctaagtgccactgtggacgttttcaggggctgtgtggggacgacacactgcgaccctacaagcgagcacccttgtggacgctgccccctccaggccgcagggacagtggcagcagctggcgctgggctgggtggggccgacgccagccctcacctctgcttggggtccttcttaagcagcccagcaagcagggacttggcctcggggctgagcgtgcgcgggaagcggatctcttccatgaggatgagctcgaagaggcgctcgtggtcctggttgtagaagggcaggcggccgcacatcatctcgtacatgaccacacccagcccccaccagtccacggcccggccatagtcattgtcctccagcacctgaggatggaggagaaatgagggctgggcccgtggccctgaggctggcatcacagtcctgccctcagggcatctgggctggaaacacacaggtctgggggatccccctacccttggcctcacacgttcctacccccaccaaccccagacacctcaggcgccaggtactccggggtcccacagaaggttttcatggtggccccgtcactgatgccctctttgcagaggccaaagtcagtgatcttgatgtggccatctttgtccagcatgaggttttccagctgttggaaaagtcaacggatctcaggtgcatgctcccaaggcttcctgccaccccagcctttccttccagggaaagatgcccggggctcctggacatcaaccctcccatgccaggctgggcccagcacacacagcctcaccctctgaggctcagagagaggccagatccaaccctcctcaccctctggcccacccccatggtacctgggaacagctgggcagggagagccgagagccaggccctgtccacccaccgtccccattgtgaactgtggttcttatttcgaacgtgggggcactagctttcttctattctttttttctagactttctgtcctttaattatgaaatatgcagccaggcaaagtggctcacacctgtaatcccagcaatttgggggacttaggtggcaggattgcttgaacccatgagtttgagaccagcctgggcaacacagcgagaccccatctccatatttcttaatatgaaaaaaaaaattagccaggcatggtggcacacacctatagtcccagctacttgcgaggctgaggtggcatctccccctggaaggccctgtgtgcccctcccggttactgaccatcccccacaagaattaacctctacttcccatctgtaccactgcacacagacacacctgtgaactgtggactcacctcctctgtgcggctttccctcgacattagcctatgagacgcgtccacactgtcgtgtgtagctgtagctcattcctaactgctgtgtggcgtcccactgtgagaacactccacagtggatctgactgttcctctcacagtggatacttgggttgttccagttggggctagagtaagtcctgctgctgagtgagggggacactttctaaggtgagtgtgtgtccccacttctcctgtgcacacagctagggcagatgactggtgctcagctttggtggacactgccaaactatcttctaaaattggccgggcgcgggggctcatgcctgtaatccaagcactttgggaggctgaggtgggtggatcacaaggtcaggagtttgagaccagcctggccaatatgatgaaaccccgtctctactaaaaatacaaaaattagctgggcatggtggcgggcacctgtaatcccacctattcgggaggctgaggcaggacaatcgcttgaacccgggaggcagaggttgcagcgagccgagatcacaccactgcactcaacagagtaagactcctcaaaaataaataaataaataaatacaaataaagtaggtattgtggcagttgacactccgctagtggcctaggagcgctcatgggaggcttgggaaggtccctacttggggcaacttgccacagagccaccaccctggaccttggtggggagcctggtgaatgagggcagccaccaccctggaccttggtggggagcctggcgaatgagggcagccaccaccctggaccttggtggggagcctggcgaatgagggcagaagctcagcccaacttccccagtgtgagtcccatgtggtgtgcatgccacaggtcagcctggcgcacaccctgccactaaccttgatgtcgcggtataccacgtcccgcgagtgcaagtactcaagagccgagacaatctctgcaccataaaaccgggcccgctcctctgtgaagacacgctcccgggacaggtggaagaacagctgcaggaggaaggggtggggagaggaggtcaggccccagcccacccacctgccctcaccttcccagccccctgccccagcgcagtgatgtggtgacacctgtatcatgaaccagcaagtgacagctagagggaccaatcaaggcagagcgcagaagctcataagtgacacagagctggggggaagggcgagggtctgccaggaggcacccatgagagggtatgggagagacatccgagacaggagggaggatggcatggaggcaaaaagaagcacacgtcatgaccaagtaacaataggccatgggcaagcccagatcagacagatgagcaaaccacgcatcccaaagcaggtgtgccaaccactgcacagagaaggcgcgaggcaaggagtgggtgacaaaagtgaggcgactctgtaaggggaagctgagcggctgcgggaattcacttcgagaggacacgggaacggagggctgctaggttttaacccttgggggctttctctggggcctttaagaccatccttcccagtgctatcgccccacagccctctccacacctctctggactggtttggacctgacccacccactcactagctgtgtaaacttgggcaagccacttaacctctctgagcctcagtgactgcccccccaaaatggagacgaagccgcctgcctcaagggagaggggcactagatgacactgaaatttccctccacccttccatctcacccacagctcctctccatcccgccccaccctaaagaaggaggccccagagggcaaagtcaaggcagccgcggctcacctcacccccgttggcatactccatcacaaagcacaggcggtcgtgggtctggaaggcatacttcagcgcctgggggatgaaggcagcagggtgggaggtgggagggaggagggctctgctgagccatgccagggcagggccctggccctgcttattctgcacacacacaccctgccctggctggggcccccaggagtcagccatatggggttcacataccggctgcaccttttggggcattaagtgaaggcatggctctgcggtaggaaagggttacatgctgaaccatcttgtcctctgcctccatcaggcacagccaagggagaactagagctgttctgagcaaccatggctcttgtttttacagtaaaatgtgttcaacttacacacacaagtgatgtctgctgtggctgggagtggcaaaggcttgggagccaacttcaatgacaggatggacaggctgtcagtcaacaaacagtagttctccactgcactaaggagatctacagagagttcctcagagactcccaccagggggtccttcagctcatgacaactcaactattctgttttctgcactgaggtacctcataagattttatttgaaaaagtactgtggcttaataggatacctggacagcaactgagataaagaaatgatacataagccatcctcaatctagtccatttaactggtggccactggccttgatggagactgcagcccaaacaggcatctactcagtccaggctgacagacaacacaatgctaacacatctgcttctatgagcatatctgaaaacaaaaacaaaaaaaataatgtttccacttcaaccagctgggctaagtgctcctaactcatagagacagcagccagcaaataatgtgatatcttcagttagttcaaatgcttacatgaagccaccatctatgaagaagctgtcaccctcccactccccgagcctgctcacccccaccacatgtcttggttcggatgacttggcagggcgcagcaacaccttgccctgcccgcctggcctaccccaagactgtgctttgtaccagaagattagggctctctctctgagctctgtccaaaggctggcctcacactgtctgggaaggggagggcaactcacagtgaggaacgggtgcctggtgttctggaggacccggctctcggtgactgtgtgagcgacttcatcctgcagacagactgcgggtgaggggctggtgggcaacaccacacctgcccactccgccccgacgaaggggagcaaggccttgtgaaatgcaattccattcccagccataaatgcagaaaatcacaggagtgaaaagtgaaagcctgcaaaccctcagcaaatagcagacccagacgaggatcatcagtggctctcaaagccacaggtgaaaagtcagcaggaatgtcacaatgtaaggaccaggctgctagggacaagacacctgtgacgtccctgcaagggagacaaacagacatcacgagagccccgaggtgccaccacaggctgtgggaagtcccacctagaaagcattcttgcccaaagaaggaaaaacagtgcttcttggtgtggtccccacacagcacctcagcaccgcctgggaactggcagcaatgcaaattcctgggacctacccccaggcccactgagtcagaaactcggggtgggcccagcactgtctcacaagccctttgggtgactctaattcaggttctaatttggtacctgactgtacagcagaaccaccaggagtggttccaaaaatctggagccacctgcagcaacgtgaacacaggctctctctggggcaagtttatccccaggggacacctgagaatgtctgaagtcttttttttttttttccctttttttttttagctgggggtctggctctgtcgcccaggctggagtgcagtggtgtgaacatgggtcactacagcctcaacctctgaggctccactgatcctcccacttcagcctcctgagcagctgggactacaggtgcacgccactatgcccagctaatttatttttatttttacagagacagggtcttgctttgttgcccaggctggtctcgaactcctgggctcaagcgatcctcccacctcagccttctaaagtgctggaattacaggcgtgagctgtggcgcccaacccaaaagtcatttttgattgtcacaacttggggagctagtattggcttcagtgggtagaagccaggggtgctgctgaaaccctagaatgcacagggctgccccgacagcgcagaatcatctgtcccaaaacgttaacagtgctgaggctgaggaaggctgccttaggcccaatcgtcacatcaggaatgaacagctaatttggttggctctgatggcagcaccacatgattatattctttacagtcttcatctgtcaggacacatgttcaagtatggatgagtgaagtgacgtgttgtctaggacaggccttaaagtattccagaacaagagggacaggcagagctaaggaaacaaggctggctaaacgctgataactggttaaactggacaatggctacatgggggtccgtaatatttattttctttttaaatttttgaatgtctttggaatcttccactacaaaaaattcaaataagggaaaaagtagaattccactcctggcccggcctccacctgggataccctgagcaaagcccgggactccccaacagcgacgtcctccccaacaggccccagcctcccttgacagtacctgctgggtggggccccgaggctctctctctccacaggcacccccagcccctaacatagggtggaggtggggactcagcagcaaggcctgctgctcctctctgggcctcaggctcccccttttctgactagggggaatttgtgggggaaataagcccacagcagcagaaagcgcgggtaagcgtccaggcctcagggtcaggctccagaccgcagcccccacagaggctcgcgagcgcaattcccggggcacgcaccttggcaatgatgacttccttccgcaggatcttcatggcgtagtagcggccagtggccttctcccgcaccaggatgactttgccaaaggttcccttgccaaggagtttgagatagtcgaagtcattcatggtctgccagggacagggagagtgggggcagtcagcgcctggctcatggcccgtgggaggaaattttaacaaaagaaagaggaaaaccaaaagacactgttgccaaacggcttaggctggagcaggaagggaggctctgggcagcaactgtgtgttctgaagcggccttcagaccaggctctgcaggcacagggccttgggagggctgggctctgacgtgggggtagccaggtcttcaccaactcccaggacgaacctgcagtgggtccacccaaggttgctccctcccctacgggcatggagcacaccctagggcacctgccacctgaaatcaccccaccctgcagggcagccttgtctctcagctgagccccctgaactgtgttatggaaaccaaggagagcaggccagcactgggggtgggggcaccgcaggctggcagccccacccctgctcccagcacttaccactttagcccgtgccttgctgaccgccacttccatctcctcagtcgtggaggagtcactgggggagccacacttgtagtccatggggtcctcgcctggggcccgctgcttgaggctgttggcgaccatctggatggcccgcatccactcctccctgtgcagggacacacgtgagtcccagcagccaggagtcctgggcctcagagtcgaacagctgagtgccacctcccagccacccccagcaacaggcaagcaaatgaccacataaccatgggaatttgggcaagatctgtcagaaccagagagagctgaagggacctgagtgaaattccacgccaggcgcagtggctcatgcctataatcccagcactttgggaggctgaggcggatggatcacaaggtcaggagttcgagaccagcctggccaacatggtgaaaccccgtctctactaaaaatacaaaaattagtcaggggtggcattcgcctaatcccagctactcaggaggctgaggcaggagaattgcttgaacccgggaggcggagggtgcagtgagcagagatcgcaccactgcactccagcctggtgacagtgcgagactccgtctcaaaaaaaaaaaaaaagtggaataccaagagcgatcaccaatttccctaaagtgacctggcctgagggccatttgaagccaggcagcagggaaatgatcaaaaaggagtgaccctctcttttcacagccccttgaaaatgagccaccaccctgagccttgaatgagggagagagagtgctcctgtgaattcttcggaacaaatgacaagctcaagtttataagttaccaatgttttgtaaagttaaaccaagagtaagaagcagcattcattagccaaaggagctgaagacactgcaaggcaagagctggcccgcaggactccctggaggggacagtccactgggagcagggagtctgcatggcagggacagaggtcctggcagcccagggatgtagaggagagaagctggtggacaagaagtaggtcccagcagaagggagcctggtttaagaacagttaactagaggctaagcactgtggctcacacctgtaatcccagcattttgggaggccaaggtggaccaagtgcttgagccgaagcgttcaagaccagcctaggtaacaaagcaagacccatctcttaaaaagtttttaaaaaacaaaaataaaaaataaaaacaggccaggtgcgatggctcacgcctgtaatcccagcactttgggaggccaaggtggaggatcacttgaggtcaggagttcgagaccagcctggccaacatagtaaaacccagtctctactaaaaatacaaaaaattagccgggcgtggtgacgggcgcctgtaatcccagctactcgggaggctgaggcaagaggatcatttgaacccgggaggcggaggttgcagtgagccgagatcgcgccactgcactccagcctggacaacagtgcgagactccatcccaaaataataataaaataataataataataataataataataataataataaaataaagaacaataaactagttctgtcactcatggtttagaacttgctgagaaagaactgtctttgagctgggctcggtggctcacacctgcaatcctggcactttgggagactgagacgggacgatggcttgcatccggaagtttgagaccagcctaggcaacatggatacccactttgtagagaccaaagataaaaaattagccaggtgtgggggcacatgcctgtggtctcagctactcagggggctaaggtgggagaactgcttgagcccaggaggtggaggctgcagtgagccatgatcataccactgcaatcagctaaaaaaaaaacaaaataattttctttggatacttacaaactgttctgtctaataagtgaaaatgaccagagaccaaaatgaaaaatatattaggctgaattacaccaaattgtccacatcccccatttttgaccacactgcaattaggtgtttcaacccaacgcattttgaaccccccgtgtattttgcttgtatctagaaaatactcatatgaccaacaagaaaaataaaatgttcactaagaatgagaaaattcagagagtgtaatcacgcaaatcccagtgatttaaataagccacagggagtgcagccagcccttcacagcatcttccaggatggcccccgccccagggcaagtgtcactgctcctgtgttcctgagacactggggcccctacccaaggtcaggcagggaacaagtgtggctgggactgggcttcaaaatccaagccgggacaccctgctgggctgtattcctccccagtctcgtttcctggtgtaccacgcgaaactacttctatttccatccatcccacaacgcaccctcttccacattttgacactgctggaatgcagattaatctcacagttggggtctgtcttgatttaactgggcacgcctttttcttggcactatatgaaacagggtgcctccccaatgacagcgccttcgatttgatgaaatatcacagcagtgtttaatacacaggctgtcgtgaggtagaatgcctgtgaggcatctgtgcaatgagacattctgcagctgggggaaagattgaggcaggtctgtatgctgacttgggatgatctgagacttcttaagagaaaaaggaaggtgcagggatgggcaaggtagctcactcatgtaatccctgcaatttaggaggcagaggctggaggactgcttgagcccaggaattccagaccagcctagacaacataagaagaccacgcctttataaaaaatttcaaaattaaggaaggtgaagaacagtatacagttctgtgctcctaagttagaaaataatgaacttctgcagacacatgctcacataggcacaaacatctccagaagagaagtcatgatcctggagccctgcctgcctccaagggaggggaactgggagtcgaaggaaaggaacagcctctaataacaaatgggaagcacttgctatcatcaactatccctactcccacccattatgaaggaggaactggggcacagattgaaaaaacagattccagaaaaacagcagttgctccaggcttggtagctggaattacaaaaggcacgctgccctccccacccactcagagactggagtccccataacccatctatgtccaccccacggaggcagagatttccacctgctttgaacacagttctgcccccagaactcatggtggatactcagtagatacttgggtaatgaaagagtgaggcagccaaagtccaagtggccccagggccagggcgcagcagggcccagtgcagacccgggcagagcacgcactgagccctggtgcacacccgggcagagcggtgttggcttctgcactccctggcccaacatctcaagccagtatttctcaacttgctttaacccatgcccccttaggaacaaattacagcctaattcccaaaccctacactaatattcctgtttttcaaaaaaaaaaaaaaaaaaaagcaggggccggggacagggcaggagcccattccatgacaggcttttttcttttttgtttctttttgtttttggagacagagtctcgctttgctgccaggctggagtgcagtggctcccaggtttaagcgattctcctgcctcagcctccagagtagctggaactacaggcacccgccaccataatttttgtatttttagtagagacagggtttcaccatgttggccaggatggtctcgatctcttgacctcatgatctgcctgcctcggtctccccaagtgctgggattacaggtgtgagctgctgtgcccagccttccatgacatgctttatcagacatagttgtcctctcacaaattttaaatttttttaatgctgactctgagtaaatgatggcggattgggaaaaaaaaaatcacagatctcctaagagatacagtgaagatattaaaaaggaaaatatgtctctcatatataaagatcttgagagactgtcacgtgaagatggcagattgcagactaagatgtacagcgtggtatcatctttgttttcaaagacaggggtggagagaacacagatggtccctctgtggagagaacccaaatacatgaaggatggcactgccacaccaccagcccagaagcagctctgggaggctactccagatgggaatcaggagcacaggccctggacccaccccagctggggctccaagagtggctctgccacctggaccagctcagccctcccagctctcccctccaccagggcctgggcctggggctaagaggttggcgggctgtcggcgcagagcaccgcgcgcagggcggggtggaagggagggtgccgaagacactcgcaggggcgggcctaccccacctaccctggctcccactgcccaccctacagaaagctccagaaaccacagcaatgcaggaggttatctgggagtaactggggctcgcctgctgcctgactagcttccgatccaattctaactggaccaaagttgcaaggttgcagcactcagaattccagatgaaaagcaagggcctctgtccaggatccttctcaagggtttgcaacatggcgtctggggcaaaggggagctccccatgaagctgggcctcaagtatcttctagcccccagaggagagcccctgggtaaaccacgactgtaaaaataacagcactgagtggctagctccagacaccacctcgcttgattctcaagagcactgcaattctcaagagccagcatttctgctgtggggactgaggcacatggaggtggagtcacctgtgaaggtcacacagcagggatgtggcagagctggcactcacctgtgcacagcctactcctccttagcaccacccgcctgtccctgagcctcagtgaagcgctgaaagctacacgagactcaggagggtaaagcagggaccctctctagggaaggctcatgggacacccagccagggagcccacgggaaaagcaaaggaagaactctcctcgtaagccatgatctgcacccgcttttcagagaggggcccccacccctgccactcaacagcagtcccaagaacaccttccacttgcagaggctggtaccactgtgcgttatggtggaggactcctgtcgccctcccagcaaccctgtgtagtaggtactgccattcacttcatgctaaaatgacaagaccgaagcacagagaggctcatctgcccaccgacagaggccagggacacaagaagtgcccaggcacttctacctccaagagcacttcccccatcggtattttctggaaccttctcatcctcatttgggctcagggccaggggagggacatgggggagccacgttcgccataccaacactgggaagggcacagtacggggcaagcacaggctctgggccaggagctgtggggtcattgccacccaatgcgctgcctgccttccgtaccagctggggacctcacagtgggtgagaggacaggctctgggggatggcctggacgtggatcccagctctgccccttcctgcaggcaacactgggcaggttgtatgcccttcctgtgcctcggtgggtgaggcactagagggtcctatcagggtgaaatgagacactagacataaagtgctgagagcggtgcccagcacattgaggtctcagaaggctgtcatgagagttcacccagccggcctgcaaatgtggagcatttctgtgcaccaggcttgttcagggcactgtggatgcagcaggggacaagcccatcatggctcctgacctcaaggggaggacaagtgtgtagaagctccaaggcgggggccaaacagggagactccttctcagagggcagtcaggggaggcctgaggagatgacgtttaaaccaggacctgaacaatggccatccccagtgcctagaacaggcccttggcacacagctatgaaataaatgaaatggagggaaggaggcaggggattgggagggaaaggaacccaggcagagggaactgcatggcaaagaccccagggcaggagcaagctggggtgtctgtgaaaggcacacaggtgccagaatggctggagccaacagagaggagtggaggagatgaggacagagaggagtgcaggagatgaggacagggaggagtggaggagatgaggacagggaggagtggaggagatgaggacagggaggagtggaggagatgaggacagagaggagtgcaggagatgaggacagggaggagtggaggagatgaggacagggaggagtggaggagatgaggagagagaggagtgcaggagatgaggacagggaggagtggaggagatgaggacagggaggagtggaggagatgaggagagagaggagtgcaggagatgaggacagggaggagtggaggagatgaggacagggaggagtggaggagatgaggacagggaggagtggaggagatgaggacagggaggagagcatgcccagaccgctccggcctctacgtgccaccatgttagagatctgggtcttatcctcagcaccacaggaagtcgctgaagggttttagtcaggggggaacaggctccaaatttctgttttaagtcagtagctgctgtgtgggctacggactgggggcagtgagaggagaccccggcatcctccaggaaagagatgctggtggcagaggagacagaggtaagaaaggtaccagtgctgcgtgtgccaaagctgccatgggcaggccctgcgccagtgccttcatgtttacttcctcctctacaccacatgacagccagggaactgagccccactgagggagagacacggcagctggcctgaatccagggcctggaccccagccctgggccatcctgcggggcaccccagagagaagctcggcgaagcagaggtggcagggctgtccttcatgcacaagcccgtcctcaccgcttcaggagtgacagctgactgtggggactctcccctaaccatcacctccccgacctagaggggcatttacagctggagggcatctggggccctccctgtgcacagatagtctgccttgtgaggagaaaataaattaatatatgaaaagtcctcggaacaggatctagctcagagaatttaattattttttatttatccaacaaacatttactgaacacccatttgtgtgccagatacatacataaatataaatgtcccacttggtggacaggtgctatgaagaaaagcacagctggggaagggcaagacagcgaagggaggcagggcaggacgcactggggtggcaacactggggcagagacctcgtggagtcggggagagctgtgatggcatctcagggaggaaggccttagacaaacgcgacagcaagcgctgaggccctcgggcaagagatgtgctaggcatgtttaaggaacagcaaggagacacgtggctaagtgagggtgcttgtggtaggaaatgcttctggagaggtcgctggatcatacaggactctgcaggacacagcacggaccttggagtttactctgagtgggagtgaaagccattcagagttctaagcagagaaaatacatgataagatttacatcaaggccaggcacggtggctcacgcttgtaatcccagcattttgggaggccgaggcgggcagatcacctgaggtcaggagttcgagaccagcctgaccaacatgagagaaaccccatctctactaaaaatacaaaatgagctaggcatggtggcgcgtgcctgtaatcccagctactcaggaggctgaggcgtgagaatcacttgaacccaggaggaagatgttgcagtgaaccaagattgcaccattgtactccagcctgggcaacaagagtgaaactctgtctaaaaaaaaaagaaagaaagatttacgtcaaaaagatcacagatggccaggcacagtggctcatggctgtaatcttagcactctgggaggttaagatgggcagatcacttgagcccaggggttcaagaccagcctgggcaacatggtgaaaccccatctctacaaaaaatacaaaaattagcctggtgtggtggcaggcgcctgtagttctagctactagggaggctggggtgggaggatcacctaaatccgggagattgaggctgcagtgagtcgtgattctgccactgcactgcagcctgggcaacagagaccccatcaaaacaacaacaaaaagatcatactcacctgatgcactattaagtattcttgcctgccaagaccaggggtctgcaaactttttccatcaaggaccagaaagctgggtgtggtggtttgtgcctataatcccagcactttgggaggtggaggagggaggattgcttgagaccaggagttccagaccggcctggacaacatagcaagactctgtctccacaaaaaaatttaaaaattcgccaggcatggtggtgcatacctttagtcccagctactcaggatcctgaggcgtaaggatggattaagctcaggagtttgagactgcagtgagctatgattgcaccgctgcactccagcctgggcaagagagcaagaacttgtctctaaaaaaaaagttttaaatttaaaaaattttaattaaaattttaaaagggccaattattaaattttttaggctttgcaagacagtctttgtcacaactacttaacccagccacagtaagccaaaagcagccagactattcatgaacaaatggacatggtcatgttccaataaaactttatttacaaaaatggaaggcagggccatagtttgccaaccctgttcctggcctaattctagtttacaagaaatacaaacatggggaacaaaagtaaacaacaccaaaaggcaataatatgacacacccagaaggtgtgacattctacaagacaactagcctggcttgtcaaaaaaataaataaattaataaaaaatcaatgtcttggggaggaaaaaaaaagacaaagggctgaactagattaaataaaacaagtcaaagagacatgtaccttgaatgaatactggttttaaaacaatgttctaaaggttgcatatccttcaaaaggtaactaaagaaattcaagtacggcatggataaggagaagttactagtaaacaaagattataatcatctcaggcgtgacagcatcatgattctgtaggagaaagtccttattcttaggagatgcctgctgaaacactaagaatgtcactaagtatgaacacaagttcaagttcagcataaaacacaaccagatgaagcagacacggtgaatgcgggactgcagagtctaggagtggggcgcgtggatgtccattcattatactattctttcaacttttctccatgtgaaacacgtctgcagtgaagtgggggacagggaggagggtctctccagctggagaggcaaccaggagcccagtgaggaggcgctgcagcacctagccaacaagcagtcaccgactggcacccacctgccctgcaacccctgcctccctccccaggcttaagagaggccagctgacatcagcctgtgtgggccagggctgtgaggacagcatcagtcagccaggagcagagtggagggggcctccctcttgctgggtttctggttcaccccctccacccacccatagttaaggtcagaaatctgggacctggtctcttagtcgttccagcagttttctctttggcaacagcagcaggtaccaagaagaaaaggcaggtggggctctccagcctacagaatcttggtaaaggaaagggcatgttgtcttgtgaaaatggaaacgagaccatctctcctgcctactaaaacaccttgtcagctccaccttgtcagtacctgatgtgccaggtactgctgcatcagccgctcctatttatcattcccctgcatcgtgtaactaccctgggacaaaccgcaatttactaagtgcctgccaagccctgtggggatctccacctggagtccaaggccttggctgagctctccagcttcgagcgcctccacttcccctcttccaacactcctggccccttggttctctggtgacacagaaccccctgtagtctctggaatgcatgagctatttcacctccaggtctttgcatatgctgtcccttctgaactttctccttgctatctccgtggccaaatcctatccagtcttcaaaacccagctcaacacccaggacctatacacccactggtctcgatctgtttttactggccattcatgttttggtccatagttttcaactgagtagcacctcagctggcttgagatggtaattttgttcccctcagtggggcaagtatattttttaccttgggaggatgtgcaacaataattatagtatagattatagtaacaagtctcatgatattgtgggttcctgagctgtactgtccaagaaggtagccactagccatatgtggctctttaaatcaattaaaataaactagaaaaaatccattccttggtggctgtatttcaaatgctcaatcggcacaagcagtcagcacaggcaatcggcacaggcaattggcacaggtgcctactggacagtgcagataaagggcatttccacaatggccggaagttttcttggacggcatgattttagggctctctagagggtctgctgaaaccttaccccatagataagctagaagactgtttctcaaagtgaggcccaaaaggacaaagtgggaaaaagaaacatttcccactgattacaaagggcaaagctccttaatctataaagagctaatacataaataagaaaaagaccaactacccaacagaaaaatagacaatatagacacttcagaataggaactcacatggcccttgagggtcaaactcatccacagagaaagaaaggaaagttaaacaccccgaggtgctgaatttttccactgctcagactggtacaaatccaaatgtttgaaaacacaaggccatgggggcactctcagacatcgcctaatagaaacatcgcaaaaccacaaacttattttccctgtgcctcggcaatcctgcatctaagcactcgtcacacaggtctacctgtgcacacatcaaacgagacagacacggctatttcactgcagcattccttataatgagccaaaggctggaaacaaccccagtcatcacaataaagaacggctaaataaacacacttgggacacgcatgtccaactgtccaaaaaaaaaagcaaaacatgaaacaaagcagctgcatctctccatatatcaaggcaaattccccaaggtacactaagggaaaaagcaagtccagaagcatgtacaatgctaccttttgtatttaaaaaaaaaaaaaaaaaggcagccaggcacaaaggtctccctctgctctttgagggcacctaagaacagtgattaactggggggcagggaggtggatggaaagggcagggtaggggaagctcccactagacacctccttatactgtttcaattttgaaatagatgagtctttatcatctcttctgattactaaattgatctttttaaaatgactctctggaccacctgcctcaaaatcaatagagatgctcattaagaatgtaggtcctgccgggcagggtggctcacacctgtaatctcagcactttggaggccgagggagatcacctaaggccaaaagttcgagaccagtgtggccaacatggcgaaatcctgtctctactaaaaatacaaaaattagccagatgtggtggcacgtgcctgtaatcccagctacttgggaggctgaggcaggagaatcacttgaacccgggaggcggaggttgcagtaaactgagatggcaccactacactccagcctgggcaacagagcaagactctgtctcaaaaaaaaaaaaaaagggggtcaggtgtggtggcttgcacctgtaatcccagcattttgggaggccgaggcaggcggatcacctgaggtcaggagtttgagaccagcctggctaatatggagaagccccttttctactaaaaatacaaaaactaagccgggcatggtggcacacgcctgtaatcccagctacttgggaggctgaggcaggaaaatcgcttgaacccaggaggtggaggttggaggttgcagtgagccaagatcatgccactgcattccaacttgggcaataagagcgaaactccatttcagaaaaaaaaaaaagaatgtagctccctgaccctgggcagatctccaggtagtcacaggtcttgaggcgaggcccagcggtctagacatttcacgagctctgcctgtgattccgatgcacccgcaagtcaaagggcagagtagggtcttcagactaagaaccccagctcttctcagccccagctggagagaccccccaaccagaagcgcagataggaaacccctatgtagggtcccagggaaaatctctccagctgtaccttttctcctcacaccaggcttgctccctctcaagggcagccacacagaggcccagactgacctctcgtctggagaatccacgtggaaggtcctctcgatgactgtggtccactgcaggcagcgtatgacaaaggtgttgggtcgcggcctctcggtcttcatcagctggcattctgcaggcagagggaacagacagcagggggctgaggggatagccctgctagcctgcagcccaaagtgcccgagccacctcccacaggcctagccccatgctagatggtgctggggacactctagggactgagacagccctggtcctgttctcacagggctcagggtctagtgtgtgtgtgtgtggaaggagagaagcccaccagagagtgatggctccatagacagggccgcgatggggacaagcctagaggtgtgcagaagctcagaggtagcatccaacccagcctggggggttggggggcttcccagaggaagcagcttctctgaactaagccctgaaggaaaagggaacttagagggtacacggagaacagacgctcagaggtgagaggaggttcaacatcctcagggggtggccaattctgctccaagggtgaggaggggtaagtgagagacagccctggagaggtgggctggggccagccaggcagggctttggaggccatgggaaagaatctggactttgtcctcagggcagcagggagccatagaaggctttagatagggaagagacacaaacagactgagaatgatccctctggctgccatgtagagggtgaggctggaggttggaaggccagggaggtggggagccagctagggaggatggggccacaccagagtggagccctgcagacaggccatgggaagagggcactgaggaccaggcccaggcctctcggcctgctgtccctgagacagagacaggaatagagctgggagaggcctgaaggtcaggttgggatgtggcacttatgaggaccttgaagacacttggggagatgtgtccaaggagcagcctgggacaggctgggagttctagtgagacactgaggttgggaacagatgtgtcagggtcaccagcacatgtggagagcaatcaggaaaaggcttcatgcagagcagcgtgggacggggactgggttccacagcatggcaggagaggatagtggtctgagctaaggcactggcagtggagatgggggtgcctctgtaatgttcttagcaggcagaacaacaggacatggtgacccatcaggtcagcaaggaaggaaggcggcagaaaggggcagcgatgtggacaggaccatattctccaaggctcagtcaagagcttggggcttgtgaaacttcactgccagggtctggctggaagacatccctttgggtattacagagggacagaggacgcgaggccagccctgtgaccagctgagtgggaagctgtgacccctctacgtccgagggacagaggatggaggctgttaccaaagcacaggatgggaggcacctgccaccagttggggactccaaggcctggctgacagaagctggaaccacaaggaggcgatgcatggggctgggtgtgggcaaatgccctggcttctccctccctcccactctgcatctccccgcaggacagccccgcctggccagctaacaaggagggagagcaggggaagggtgaaaacagatccaagggcaagcaggcccaggacaggcccatggctcaatgaccaagtcccacaagcccctaagacgtgccagccatcctgtgagcaccagaacactgacccactcatcccaagacacacctgctacggagaagttgtttaaggggggtagagtctgatcaggggcctcgggcctctccttgtacccaatgaaggagccgtcgctcttcagcaggaagtaccgtggcctccaggtcttgatgtattcacctgaaatgaggcaggaagggagggagagaggttaggacaaggttgagtgatgtcccaggtaggcggcaggaggcccagtgtgacggtgactcacaaggggtaccacggggcggggaggtgcgggggacacacgagaatgcctctcccagaggagccctccaggtggcccctgctgacgcaggctggggcactgggctgagcccgggtgatccacaggtcatgcctggcaggaaggtgccagcagcagtgccctggggcaccagttgcctcagcgtgtggcaaggagcaagctgtctgtgccagctcctggcctagtcccaggggaggcccaggcttccaaacacacatgccctgtggccctgtaaggccaaatcccatgggctgggattcaccaatacagctgtgcaggtagctccaatgccaaaacacttctgtgccaggcagggtggcactgctgccacaccctcccagcgccccttgactctttccaactgttcttcaccatgaatatccaagcaccctatgcacacaaacacacacacacacacacacacacacacacacacgaacccactcatcagagagctgctaaggattaaaaggagatggtgaaacacatccacacaaaaacttacacacaaatgtcctcaacagcattattcataacagccatcgagtggaaacgaccctaatgtccatcaacaacgaatggataaacaaaatgtagcagattcatacaacggaaaactattcagtcataaaaagaaacgaagtactgagacatgctgccatgtggagggaccgtaacttatgctaagtgaaagaagccagtcacaaaggaccacgtatcattatgactccatttatataaaatgcccagaacaggcaaatctacagagatgaaaagtagggcccggcacggtggcgcacacctgtaatcccggcactttgggaggccgaggcgagcggatcacctgaggtcgggagttggagaccagcctgaccaacatggagaaaccccatctctactaaaaatacaaaattagccaggcatggtggtgcatgcctataatcccactacttgggaggctgaggcaggagactccttgaacctgggaggcagaggttgccgtgagccgagatcacaccattgcactccagcctgggcaacaagagcgaaactccgtctcgaaaaaaaaaaaaaaaaaacaaaaaaaaaaacctgagtatggtgatggatgcacaactctgaacatactaaaaccaactgaactgtatgctttaaatggatgaatcatgtagtacatcagttttacctcaacatggctattaaacaccagcacagtggctcccacctgtaaaatcctagcactttgggaggctgaggcaggcttaagtctggagtttgagacgagcctgggcaacatagtgagatctggtctccacaaaaaatgttttttaattagccaggagtcgttgcgtgtgcctgaagtcccagctactcaggaggccgaaatggcagaatcacctgagctcaagaaattgaagctatgatggtgccactgcagtccagcccagtgacagagcaagaccctagctcttaaaaaaaaaaaaaaaaagcatttacaaaagcctccaaaaaaatacttaaccaagggggtgaagggcttgtatactacaaaacattgtttaaagaaattagagatctacataaatgcaaaaacatcctgtgtgcatggattagaagacaatattgttaagatggcaatactacccaaagcaatatacagattcaatgcaatccctatcaaaattccaacaggctttttcttttttcagaaatagaaaagccaatcctcacattcacatggaatttcaaagggccccaaagagccaaaataatattgaaaaagaaaaataaagttaaatactttccaatttcaaaatttactatacaaagctatagtaatcaaaacagtacagtttatacaggacagacatacagaccaatggaagagaattcagagccaaaaaataaacccaaatatctacattcaactgattttcaacacagatgccaagatcattcaatggggaaagaacagtttcttcaacaaagagactatattttttcaaaacgaaagaaaagaaacctagaagaaaaaatatccttacaattttttttgttaatttaaatactgttccttgcagagcagggaacagtgacccataggcaatgtgcccagagtagcctatcctcacaatcttatccctattttgcagatgaagaaactgaggcaactggatatccacattcaaaagaatggatatcacattcttttgtgatatcctacttcacactgtaaaccatatacaaaaataaactcaaaatgaattgacctgaatataagagctaaaactacaaaaaaagtctaagaatacatgagtaaatctcattactttgaatttggcaatgaattcttagatgacaccaaatgcacaagcaacaaaaagaaaaacttcaagtgaactcatcaaaattaaaaacctttgtgcatgaaaggacactgtcaagaaagtaaaaagataacctacagaatgggtggaaatacttggaaatctaataagggtctattaaccagaacacataaagaactcttacaatgcaacaacaaaaagacaaactgcctgattttaaaatgagcaaaggactcaaagagatattcctccaaagatacacaaatggtcaacagaaagatgaaaagatgttcagcatcattagtcatctggcaaacataaatcaaaatcacgatgaaggccgggcgcggtagctcacacctgtaatcccagcactttgggaggtcgaggcaggcggatcacttgaggtcaggagttcaaaaccagcctggccaacatgatcaaaccccatctctactaaaaatacaaaaattagccgggcgtggtggcacatgcctatagtcccagtgcttgggaggctgaggcctgagaatcatgtgaacccaggaggtggaggttacagtgagctgagatcgtgccactgcactccagcatgggagacagagcaagactctgtctcaaaaaaacaaaacaaaacaaaaacaaaaaaatccacacacacaatgaggtacaactttacatgcccaaggatggctgtaatgaaaaaaaaacaagtgttggcaaggatataaactgacaccctcatgcactgctggtgggaatgtaaaatggtgcagctgcttcttcaaaaagttaaatatagaatatatcaccccgaggccgggcttggtggctcacgcctgtaatcccagcactttgggaggccgaggtgggcggatcccaaggtcaagagataaagaccatcctggccaatatggtgaaaccccatctctactaaaaatataaaaattagccaggcatggtggcgcacacctgtagtcccagctactcaggaggctgaggcaggagaatcacttgaacccaggaggcggaggctgcagtgagccgagatcacgccactgcactccagcctggtgacagagtgagattccatctcaaaaaaaaaaaaaaaaaaaaaaaaaaaaagaatatatcatcccaatgtccatcaacaaattaacagataacaaaatgtgatacatctacaacatagagattattcatccataagaaggaacgacatattgatatacgctactacatagaggaacctcaaaaacattaagcttagccaagtgtggtggcacctgcctgtagtcccagctactctggaggctgaggcaggaggatcacttgagaccaggaggttgaggctgcagtgagccatgagccaaggtcccaccactgcactgcagcctgggcgatagcccaagaccctgactcaaaacaaaaaatcatgttgctaagttaaagaagccagtcacaaaaggccacatatgattccatttacatgaaatgtccagagtaggtaaattcatagagacagaaagtaaactggtggttagcagacaccaggagacagggggtgctatgaattgaattgtcccccaaagttcatgtgttggaaacttgatccccaatgcagcctcatgggaggtatttgggtgaagggagcaccaccctcatgaatggattaatgacattatcacagagtgggttccttataaaaggacgagttcggccaggcgcaatggctcacgcctgtaatcccagcactttgggaggccaaggcaggtggatcacctgaggtcaggagttcaagaccagcctggccaacatggtgaaaccccatctctactaataatacaaaaattagccaagcatggtggcacacgcctgtaatcccagctactcaggaggctgaagcaggagaattccttgaaccaaggaggcagaggttgcagtgagccgagatcgcgccacggcactccagcctgggcgacagagcaagactccatctcaaaaaaaaaaaaaaacaagacaagttcagccctgtcttgttctctcttacccttcccctttcaccatgggacgtgtgacaagaagatgccaaccctgaatctcggacttccctacctccagaacggtaagaaataagtttctgttcattataaattacccagtctcgggtaatatgttatagcagcacagaatgaactaagacataggatacaaaaactgactgcttaatgggtacaaagttttattttggggtaatgaaaaggttttgaaactagatagaggtagtggttacacaacattgtgatatactaaaggccaatgaatcatacacttcaaaatggttaatctcacgttatgtaaatttcatccccgtttttttttttttaaaggataaaaactaaaaaaaacctcatctgtgttactggaggttaggagagcggtaactgcttgggaggagcacttgggagagcttccggggaccgtcttattctatttcttgaactgtacactgggattggggcgagtttattatccaggcatttatctgtggcctttcatactttggtaacaagctaagaaaagaaacctaaaagctgaacgcagtggctcacaactgtaatcccagcactttgggaggccaagacaggagactcacttgaggctaggagttcaagacccacctgggcaatatagcaagaccatatatctatgaaaaaaaaaaaaagacaaaaaacaggtagaaggaaaaatatcctcacaattgtattcctattttgcggatggggaaactgagtcacagagaggtcctattagtttgcccaaccttcccagctgttacctgggagagccagaattggaaagcacagcccacatcttgactactataccgtctgcctctaaaccggcagatggagcccagcatggggcgtggcagagggcaggtgctctgctaatggtggtgtgctgcagctgtgtcagaagtgggaccagcacatggcatgagtgactctgattagatgtgctattactacacccttggccttaagcacagcttgctgggtgagaggcagcacgtgggccaggccttgagagcactagttcaggagtcagagggcctgagtccaacctcagctctacccactccttgctgaaacctcaagcaagtcactcttcctactgaaccttagctttccagtctgtaaggtggcatgtgctccacagggcatctataaaaattcaacaaaatcaggcttgcctagagcagagacaggtgtctggcacacagtaagtgctcagtaaaccagcactgccattattttaaccaccaagggggtcggtggggtggtacaggtcccaaaacagcagtagtcagcagggcccacctcaccttgcccacctctgccagctgctactcagaaagatgggcactgggaaggcccaagagtgcaggtgtgcacaagcgtgtgtgtagggtgcaaacctgagacaggtgtgtcagagctaggccatcccagatgacagaggcaggcctgtggctgggtcatctggccccttgtaacatgaatgcggacactgaaggcccaagaggggccaagactcatttaatgccatcagtaatcctagaccagagagaaactcttgcccctccaacagttccacacccatcccaaggctctcacagtccagcctaatgagccatggcctccgcacgtgcaggccacgggacaggagcccatgaccctgtgttccccagcacaccacccacacaccacgccaaccattcattcaacaaccatttactgagtgcctactgtatgcccaccacttttagacgtgctggggataccactgtgaagaagcctcatgaaaatgcctacccttgtagagctgacaacatcagagatctggcttgttaacccactttatagatgtgaaaccaaggctcagtgaggtgacatggcttgctcacagttgcactaagaggaagcagcagaaccagggttagaaccttgatagctgccaagactcaggaagctccatcaacaaacccagactccaggctcaggctgggggactgggccaagggaccttaaaagccatctctgtccagaaagagcagcaggacacgaatctcctctgctcagtcaggtggggaggctgctcccagggaggggcgtccatccctcatcgctgctccctgtctgcgtctgcaggctggtacagtgcaggatgcgtggctcttcccgatgcctgcagcgccagcttcctgccccctctttgaacaagcccacttaccccctcaggactcattggctgtcgcctctggcataactgtgaggctcaatccccgatttccttcaggcctttattcagatgcccccttctcagcgaagccccctctggccgccctgcctgcctcatgccctcccatcctcacgttgcttgttttttctccatggctcgcgccaccgtgagacatgcatgtctgcctgggagctgtctgcctccctgtcagcgcccaagatactaacacgaggatgggatgtttgcctgtcgggctcactgctggaccccaggacctagaacagcgcctggcccacaggcgctgctcagcacgtgtttgctgaatgaatgcaagtgcacacagggcagccaaccgccacacctggggaccttctttccagggggaggcccacagaagctggcctgggacaaagccatctctcagcaggtggcgcttctccccatctgcctcccagtcttgcgtggcagccactttgggacaaacagccctggggtcaaaaagggtctcttccctgtcctaacttcactaaaaggggacctcagcttcccactagtacaaatggatcaggccacgcatcggctcacgacatcacagggctgctctcgtctggagtgccaaagccaaggtccttttccatgacctgcaggcgcgacacagctggactccgcgttgctcctctgcttgcctcccccagctcgccctagctcacactgctccagccacgctgttaccagaaaacaccaggcacatccccacctgggagcctctgtccttgctgtccctctccctgggacacccttgcccagccagcgtctcacctcctccaggctccaggcctctgaccactgccgtctcctccgggcagcctcttgatgcccccccgcccccagcccattgtccctcactcacagttcccacttttcaccccagcacttgccaccccgacattccatgtctacttatttactgcctgccccacccccactggaatgtaagctccatcaggggaccactgtgtctcggagcccggggctatccggcacagcacacagtcaatgaatacttgctaactgaatgaatgctgaatactgcctcactgtgttagttcagtgacgtgacttcccctctctgggcctcagtttcttcatctataaaatggggctatgaatgagatcactcatgcacagtcagatccctgctctcctgcccagatgaccactgaaggagtccacgaaatgggggcataagcagctgtgggcctggggctgcggaatgctggctcctcaggctggtaagaccctccgcctctgcctctcagggcacagctttccaggaggagccagcgtgggagaaagaatctggcgggcaaaagcggcctcttaccacgcttgtggagccagccttctttgatgacagacacctcattcatggtggcagcgtggtacgctgtcacctagctcgggacagctcagggcagcaggacatgcaggaggcaccgtggacagggcacagtctgcaagacaagagaggagctggtcagggcgggaggggattccacaccagccccttccctgaggacgccgggctctgaggccctctggctgttctgcccactcagcaaagggtaaggccagcaagggtggcgtggagcccgctctcaaggacccattctgagcagagagatgtggcaatgtccccagcgaccccaatctgggggaagcagagctccccggcctaagcgcaggccagaccccaaactcaggacacccatgctggggggaggtggcccctccacccacagtcactcctgactgagcaagcatcaaggtagccgtgccctgccctccccgtgtcattcccatggcccaacactgaggtaacccagtatgaatgaggcagcccagggtacctgagggaatgcgcagagccaccagcatctgcctgtccctccaccatcttacacacacacactcttttctctctctcccctctcccttctttccaaaccaggaagccaccaacctgccaccttcaacaaactaagcacactcccgtccccccatgccatcccatgccattccctgagcctcagcggcctccctccccccatcagatgacagagaaaagacaggtctcagacaatccgggatcttgaacaagaaagcaacctactgcgtatgcacggtctggggcctagaagccagtcctgggggcttgaccgaggccctgatccctaccccaagaccttcacttctgtcctcagggaccagcaaccaacagactgagggacgccgaggccactgcttcgtctcaggttcccagaacggaggggaggagggcgcgaggcagcgccagctgggcccctacctggagcctggggcctggccagggtccacagagaccaaggcgcctttgcctttcccagcctggggttatttgcggacagcaggtcgggagctacggtggcgcccagagaagtggcagctggctctagggacaccatgggcatcagctttctctcgtgccccaggggagctggtgggccggacacgctactgcctggcatgtgacagtggcaggctgcccaggtcccggcagaaagaagggaggtaagtggtaggaagcgggaggaaagacaagatggacatgacagggaagtaaacaagagggtgagaaatcacattctgggctccaagctgcaaaggcaatgatgcgaggctgggagcagcaataaggggctccccttgccagcaacatgcccggcaccccacaacccaagcacacaggactgccagactctcaatcctcagcatccccacatctcggccgggcacaatggctcatgtctgtaatcccaacactttgggaggtcaaagcaggagaatcccttgagcctaggagtttgagacctgcctgggcaacgtagtgagaacttgtctcacgacctaatttttttctacaaaaaaattaaaaattaaaaaattagccaggcatggtgctgtgcacctgtaatgtcagctattcgagacaggaggatcactcgagcctgggaggtccaggctgcagtgagccttgattgcaccactgcactccagcttaggtgacagaatgagaccctgtctcaaaaaatatataaatatgtatgtatttctgtatctcccactgttctgtgtgtcaacctctaacgtgaccatctctccccatcctgcccgcggcctggctctagtcaggtctgcccccatctgcccccacctcttccccgagttcctacgctccactcttgctccctcccactcaccccacattcagcagctagagggatccccaacgctgaacctgtctttctcctgctcagaacctttgtggctccctggtgttcccagcaaaaaagccaaactcctcagctgaggatccaaggcccttcaggacctcgcctctgctgccctgcgttccaggtgcatgagctgagacgtgcacctagaaagccctcgggaaaggctaaggaccatgacgttgactattgcacctctccagcctctccgccctacctgactctccatgttatgcttctgtcactcaagcccttccctctggcctccatcagggacagcacctccttctgggcgttcttctctctcttccttgaggtctcagctaaaccagtgcctcctccaggaagccttccccacctcagaggctgcactgtgtgctctttgtgcaccctcggagcaaccctcccaacacctattaacgctaatgcagtagaccagcaaagcgtcttatctaatgagcacatgaagaaagaggccaagtgtccccaactgacccccaccccaggaccacacacagccagggacacactaccagactctcttcatgacaccaatcttttttggggtgcatcctagaccccggatggtaccagcaacagaatgtcactaagacacagccctgccttcatgaggctcacagtctggtgtgaggggcagaaaaatacacgaatatgcaaataatcaggtggtggggaggctggagagtggaagaacaggatgttagcttggtgtgcgggacttgcgagcagacacccgagttaactgagggagtgagctgtgtaacacatgaggaaatgtatttcagcaggggaacagaaaatgcaaggacctgaggcaggagggggcctggtgaggagaaacacgagagaggtggacaggggagaacaccaagggccttctgggctatggctgggactgagagaagcccgtcccctacacggacctacaccacaccttccctgatgcaagctcagttcaaaatacttcccaaatggctgggagggagaactcagagtccaaaggaggggctgatgtggagggaatagaacaggggctccatgtctcatctcccctctcgctggcccacagcggcccagggacatcgcctctcagggcccttgtaatgcagcagcactaaagtacccactgtgggcccagggctcggcctactgcctggcgcccagtgaacagccaaacacatggctgccattattccagagagaagcaaaggcagccaggtatggccaagagtggtctgggttccagagtccaagagccaccgccagctgggtggccttgggcagggtgccggcgctcccatggagtctctcctgaatgctcccaacaccccaccagacagtcagtgaccatgcccagatgaggacagaagctgagagaagggaagctgtttacctcgggtctcccagccgagaagcagcggaggccctggccgctgctgggatcaacagagctgctttttacaagctcatctcagcaactaaggagtcagcacagctggagggagagcagggggaggagttggaagatcccctgcgtcccgcctggatcctgccctgtcctcccactgagggtggtgcctcagctgaggtgtccgtgacgcagtcctgtggtgatgaaataccagccactgcagccaagaagatggctggcttaggccgggcacggtggctcacgcctgtaatcccagcactttgggaggctgaggtgggcggatcacctgaggtcgggagttcgagaccagcctgaccaatatggagaaatcttgtctccactgaaaacagaaaattagctgggcgtggtggcacatgctacttgggaggctgaggcaggagaatcgcttgaacccgggaggtggaggttgtggagagccaagatcgcgccattgcactccagcctgggcaacaagagcgaaactacatctcaaaaaaaaaagatggcctgatcactcggggggctgccaatggaggacactcaggcagggggacagagactcgcctatggaacccccatagcacgccctgcggaggggagtccctgcacggccccaccacactcattacttcctaaggttcctgggcatgagtcttctgagtgcctgggccagagctgcagctgttgactcaagacaaggtaaaaagagcaagagcacctcacaggagaggacacccacacaaccaagaaacatacataatctcattagttacaggcaaatgcaaatcataaccacctacctgggatggctcgaattttaaaaactgacaaggccaactgctggctcggatgtagaggaaccagaacccttactcattattggtgggaggtgcaaaatggttcaactactgtggaaaactgttaagcagtcaaaatcaaagctcaatatatgcctatcccacgacctagcaattcgtctcaaggaaattagtgtatgtacaaaagacttgtactacaatgttgacagcagcaatattcacagtaaccccaaactggtaacagaccaggagtctacccacaagagaatgaataaacaaacacgtagatccacagtagaacactactcagcaacgaaaaggactaaactgctgctgaatacagcagggaaggagtgagagaatgttatagagtgaaagaagtcagcactctgcccacgcccctcctgcagcctggagccccgtgaccacctgagtcagctcccaccccttctccgctcgaaccctcccatgcaacataaaagccaaaatccccaaagcagccccaggaccctacgcggcctgcaacatccccctttgcttctctgagggcacttcacttcagcagtgcctggctccctcagctgccaggatacatggggacgccccacctcagggccttgcaggcactgcaccctcaggtggaaactcaggcccctctccactctcttcagcctctgctcacgtccctttcttgagaagccttcctaacctccctaggcaaagcatgcccaccctacctccccttacccttacccttcattttcccctaagcacccatcaccaccgatgttactgtatgtgtttgcttacgctgacagcccaccacccacactggaatgtcagcacgacaaaggcaggactcttggctgccttagccacagctggatccccagagctttgtagggtgttgggcacagagtggagtgggtacttaataagtatctgtggaatgaacatgtacagagtgaagccctgtgcccagaacaggctcaaaataagctcaattcctttccttgccacttactaagtcctttttctctcgccccctctcactgacctgattttgatgccagacagcacagatgggctagggaggcaggtggggaagcagagatctgcgtctcttggagctggagctggtgggtggggctccttcctggtgctgcggaggctcattggggaggtggcagcgaccccctcaggagcctctgtcgcctgcactcagatctgtgcctttccacagcgcccggaggaagacttgctcaggagataaattcaaagacaacaggaagctggacgtggtggctcacgcgtgtaatcccagcactttggaaggctgaggcaagaggatctcttaagaccaggagttcaagaccagccttggtaacatagcaagaccttatctctacaaaaaatataaaaattagccaggtgtggtggtgcacacctgtagtcccagctacttgggaggctgagccaggaggattgcttgagcccaggaggttgaggctgcagtgagctatgactacaccaccacactccagcctgggagacagagcaaaactgtgtctcaaaaaacagacaaacaaacaaacaaacaaacaaacaaaaaaagctggccgggcacggtggctcacacctgtaatctcagcactttgggaagccaaggcaagaggatcctctgaacccaggagtttgagaccagcctgagcaacatggtgaaaccctgtgtctgccaaaaaaaaaaaaaacatacgtacatacatacatacatatatatatatatacacacatatatatgtatatatacacgtatatatacatatatatatatatagtagtcaggtgtggtggtgtgcacctgtagtttcaggtacctgggaggctgaggtgggaggttgacctgagcctgggaggtagaggttgcagtgagctgagattgtgccactgcactccagcctgggtgacaaagccagaccctgtctcaaaaaaaaaaaaaaaaaaaccaaaaaacccaaagacaacaggaactagtggtgtaacaggcagcatctgctcatgggaactcaggagaaaggcacctggggcaagacgtgagggaaccaactccctcatctgccaccagccattcaccactctataaactggtcccagcgtcttgtgagaacattctggtaaaactcataaagtggaaaatgtacatgtgcttggaggaatttctcctgcagaaaatgctagtgccagggcacagaagttctaagctgggaattctcagcctcaacactagtgacatttggggatagagaatccctgatgtggggactcttctgcaccctgaagaggtctggcagcatcctgggtctctactcactaaagccaacagaacaccttcccctggttacgacaatcaaacatgtcttcagtcatcaccaaatgtctcctggggtacaaaaccaccaccagctgacaaccgctgtcctaagtatgtactgctgaaatagggaaacctggcaacaatctaaaagctcacaacaggggtctggtgctatatattggttaatatcatgactctactaaaaagagcaaggctcacatagcccataccacgtgccaggcccatttgagtgcttcgcacataccaatataaccctcacagcaacactttgaggcagacactcctactgtttctatgacaatgaggaaactgaggcacagaagtgaaatgacttgccctatgacttcatctcaggaagtacaggcggcctggctcccccacaacaccatgccacacagccttgagagttaggcagatctggactggggtccttgtttgcccactttctagactcccaagcctccgtttcctcctgtccttgcaaggacagacagcagcgctttcatcacaggctaatgcagggaagggctcagcacagcacccagcacgtggagacggtctggccacacaacacaacaagccatcctgagcacagaaacacagaaaccagccctgctgtgctgacactgggaccatcagcattcgctaacgaaggctcgcggcacgacagaatgcaggcgggatgccttttctgaaacgcacacacacacgccctgtcacctcaattctacaatatgcgtattgtttcacatgctgatgtcattgagattggcatgtaccttgcaatccatggacaaaactcacctatcgcattcttttcagaaaagcagttatatgatcaatgatggaccttatagggcatactgtcttagacttcagggcacggggaggtatgtgtttaaatgtcacacgcacagaaaaaagaaatccgaaggaaatacgccacactaagaggcaggagagtgggtgcgggaggcaaggcagcctcaggaaccaaatgccagcttttcagccctggctgtgtcacctgctgtgagaccttgggcaagtcaccaagtcatgttccctttcttcacctctgtttcctcatctgtatattagagataataactgcatatacctatctctaaggctattggagggttcagtgagttaatccacatgaagtcctcccaaaagagcctgtaagagcaactgctcaacacgtatcaaatattatcatcactggccaggcgcggtggctcatgactgtaatcccagcactttgggaggccgaggcgggcaaatcacaaggtcaggaggtcgagaccagcctggccaatatggtgaaactctgtctctactaaaaattcaaaaattagccgggctggtggcaggcacctgtaattccagctactcaggaggctgaggcaggagaattgcttggacccgggaggcagaggttggagtaagcagagattgcaccactgcactccagcctgagggacagagcaagactccatctcaaaaaaaaaaaaaaaattattatttcctctgatgggtggagacatgggaaacttcactttctatactgtatgtttctgaacaggtgaatttttacctattctacctccttggtgagaaggtggcactgaagaaacttttttttttttttcctgaaaaggtctgggtacttcaaaaaaaaaaaagagagagactttttgtttcttttttcttttaaacacactccctacactcgccccatctgtctgcttggagcaggtggggctggaggcaggttgaagccgtgggcaggctgcaaaagaaacggggacaagaataagcacagagcagattccttctcctccctgccaccccacacacacaccttccccctcacgccacccagggccttacagcacccacagaaatcatgtcaaatattctagtctgcttggccacgggctccatacactctgagggctccatgctgcaaccagcgggatcctccacgcagttctgaccctgtccctcccctgctcaggacctctccctagtgcccatggatcacgtccaaggcccctatggaggctgccaggggccatctgccttggccccgcctgctctccagcctcactggtctgctcgctccaacacacaatctccccttctcctggccccatgaagactccctgctctcacaccccaagacctttgcacatgctgtaccccttgcctggcactctgttcacccatcttcttcacggaggccttccctgaccacccctctcccacgagcagcggactctcagagctcagccttcccttcccctcacagcacttgcctctgtcacctgcatgactatgtgggtaatgtcgcctctcccactggactgtgggttccacaaggcagggatacagtctgtcctagcccccactgtgtccccagctccactcagcacagggatgggcccataactttcattacttcaggggggagtggtgaacagaaccacagcatttgtgccaagtgaaggtaaaacaaaaaatcctgcattcattcattccacaaatatcacaacaactctgcatcatcactgctcgggtcaccagggattcagcagtgaccaaaacagaactccctgccattggggagttgggggaatgagggaacaggcagcaaaataaaaaataaatacatacgcaaattagacaggatagccaaagctaacaaatgccatggagaaaaggagcacacggaagattcagtgcagggaaagggagcaggggtttccgactatacacaggatggtgacagaagggcgcactgaggcagcgcagtctgagcaaaaccggaagcaggtgagagagccgggggagacctggggaggaacgctgcaggcaggggaggagcagggctgaggcgcgttcgaggcgcctacaggagtgggtgaaggggagggccgggagatgtagctagaggaagctggggaccgctgggcagggccttgggggccactgtcagcattgtggctcttatttggagtgagaggggaactatccgcctgaggcgagctggggagtgggggaggggcagcaggtggaaccccttgcacccagggcagggcaggagtccttagggaggcagcccttcctctccaggagctgtccccagaataagccctgggcactggcctgatgggctcaccacctgcctcacttgagaaccatgaggacctgcatgcagcagatgtgaaaaccgaggatgggagagattcggtgaatacccacagcgagagacagcagggacacagccaaggagcccggacccctctcctccgagccctgagctgcctccacctccttctgcctttgctcccaagagacagggccacctcccatcttgtgtcgcctcctcccacaccccggccagcccttccttaccgcccctgatgtgcacgcatgcacgggagccctccagttggactgcatggggaatccctgacccacgtcgctctgcatcgccaccacctccctgggagctccagggcagggcccagtggcaaaaggagaaaccagtgggtctgcatcaaggctaatactcagtgagcactcacaaagcaccaggcatggattaatgttcatcttcacagccagcctgtgttactatccccgttcctcacatgggaaaactgaggcccagggagagagccacatgcacacagtcacagcgagtaggtgcaggagagggaccgcaaccagagcagaactagcccacagacctttccataacgacagaaatgtggttactaaatgtttgaatgatggctagtgcaactaaagaactgactttttacttttctttaattgtaattaattaaaacttaaaaagccatatgtgagtccgggcacgatgactcacgcctgtaatcccagcactttgggaggctggggggggggggggtgggcggggggcgatcacaaggtcaggagttcaagaccagcctggccaagatggtgaaaccctgtctctactaaaaatacaaaaattagccaggcgtggtggtaggcgcctgtaatcccagctactcgggaggctgaggcagagaatcgcttgaacccgggaggcggcggttgtagtgagacaagatcacaccactgcactccagcctgggtgacagagcaagactccgtctcaaaaaaaaaaaaaaaagtccatacatggctagtagctaccattctggagtgcaattctatagaattcctgctaattaagcaccgggagcttaaaggcaggaggcagggatgtgactctcacaggcccaagaggagccagatcatcccagtgcggctggaagctcccatgctataccccatctctcccgcaccccaacgcagcttacctggggaattggagcaggactcaggcccaaactcacacctctagtcaactcaaatcctgactctaccacttccaggctacacaggtcacttctctgaacctcagcttccgcatctgtaaaatggaatctttttttttttttttttttttttttttttttttttttttgagacagagtctcactctgtcgccaggctggagtgcagtagtgcgatcttggctcactgcaacctctgcttcccaggttcaagcaattctcctgtctcaacctcccgaatagctaggattataggcacccaccaccacacctggctaatttttgtatttttagtacagacagggtttcaccatcttggccaggctggtactgaactcctgacctcgtgatccaccctcctcggcctcccaaagtgctgggattacaggtgtgaaccaccgtgcccagcctgtagaatggaatcttaacaccaatctgcccaagcacatgtttatgttatctcaaaagataatttttgcaggccaggtgcagtgattcacgcctgtaatcccagcactttgggaggctgagggatgtggatcactggagcccaaaagttcaagatcagcctgagcaaaatagggagactcccatctctactgaaaattgttttaaaaaaattagccaggtatgatggtgcatgcctgtagtcccagctactcagaaggctgaggtgggaggaccacttgagccagtgaggtcaaggctgcaatcagccatgatggtgccactgcattccagcctgggtgacagagccagaccctgtctcaaaaaaataatgaaaaatttaaaaagatgatttttctgataaccatgggttgtcctggggacccaatgagatggcttcacacacagctggggacagggccagtgcttgaaaaataggtggcaattacataaaggactctgacatcaggggccgtcctgagcctgtcagagccatgcagtggcagctaatgttactgctgtcactacttggttctaaaggaatcatcccaataatttccaacatgcccctactaactttttgaaaatatcatctaaatgaaaacacacagctaaaaagagtcaatgccctgcagacacctcctcccacccgccaaggccttcggacaccagtttgagaagctgggctctagggcgccctgtctccaaagcagaatatggtctgctttctccatccctggctgccacctgaatccagccagctctctcccacacaggtccctccccacccacctgtgtcccttctctttggggataaagccctggatccccatcatagcccaggccctgagccctgccaccctgctctctccccctcacccactcccccggctccagctacatgggcctgctgttccaccagcacatccagatatcgccttccttgcggcctttacctggctgcaccccgtccagcccacttcctcgggctctcacatcacaggggctcctcagcagccttcccaagcccctctcccacccagtccagctagatctctgttccctccttcagccacaccaagcactcacaggccaatgcaacctctctgccacctccgatcgcatccagaactacacgtggcacatagaagtgattcaatcaatatttggagacagatggaacacacaaatgaccaagaacagccaaaggctggctcctgaggctgttcagcaatcaggcccctagggcagtggggagggggtgcctcccatcctcatctcttccccctgggccccccttgggaggggccaaggtcatggtattgggggtggagagaagcagccacaccccacatcccaagcaggcatggaatggagtcatttctggattactgaggcctactttgtgccagctctgtctaggagaagagaaagcagaaaagaaatcatgatgacaacagtgacaactccagtcatagcaggcagggcaagaagatgaggctgtcttcaaaaggcagcttcgccgacagagcagggttcaaccatcatgcctattactgacttccagcaaatccaataacctctctatgcccgtttcctcccctgtacaacggggacgatcgggacagcgagctgccaggctgtggtgaggatgagtgagagcagacaccttaagctctgcagcagtgcccagcactgagaggcgaactactcacgagaatgaccccaatattctatgtggcttcctgggcctcagtttcctatctacgagatgggagtgctaacactgcccacctcccaggctgctgtgcaggtttgtagagctaatatgcagcgtctggttgggcaggagtacagtggtgggagtgattcacattcctgtctggagccctcccatcagctaacaggccctaccactctctcccaaggaccaacaacgagcctgtgcccactgccctgcagagccccttctgtgctctcaggtgccctcagtcctgtctggcaatcaccaggagtagcatcagcccaaattcatcccgccgcctcctcaggaggcctgtgctttccaacgcagcagctccgtgcatcctccccaccgccccactcagcaggaaggttcccgtttacagctgagcaaaatgcaccttagggagaagaaataaggccccagagctccacagccaccgagaggggtgccaagagcagggttctcacccacgtcagctacccccgggaccaggtcactcagcagccccagctgggtaagtgtacaccaaaaacccaccagaccatgaagaacttgaagccaggctggagaagagaaccggggagcggcaactgccccagcccattcggaaagggcccacaaagtggcaaaccgaggaagacttgggtttctggcctcacccttagaaacaacatctgcgaacgagcttctccagcaggacggctgggctgaagaaactcctgctgggacctctgacatgcagtctcctcttggccgacccggcttgctgtccctcgctcggcacagtcagagcacctgggccctgctgtgggtgccgagttggcagtgggtcctgccccaagggggccaggctgagctcccacccagcgcccctcccacactcactccctccctcctggtcctgctcccaggctgtctcccccagctgggcctctcgctgcttggctggctgtccagaagagcctgccatggaaccaccccaccgtgcggcccggaggcctgtggttgagggccttccgctgagagctctgggaagctgaagagaggcccggggaggggtgaccctgggtcctccaggggcttggagctcaagtctgaaagacactcctttccatcccaacccatcccgggggccttctggagaccctagtggtttgttctgaggggttctgctccttctaggaagataccctggaacacacctcaaaaaaaaaaaaaaaagccagagcgcctgctcccgcaccaagccttaggggtgagcccatgggtgggatcagaagtcacactcaccaggggctactgagctgtggtgggggaatctctggaagcccagattcatagcctgtccccaacacttcctggttgggggactcagcacaagctacagaggctctccaggcttcagttctcaccacttgtaaagcgggaatcagagaagattcctcctgggtctaatgggtcttcacccagatcctcccatggctccctcacagcactccagtccctacccacacgtcacctcctcagggaggtcctccctgatcacccagctatagtggagaaacatgcccacactctcaacctggccctcatttattttgccttcgtaatatcaaccacacctgagcccaaccagagacctgggtgctgggcgccagtcacaagccctggtctttccaattccagaggagcactgggaatggcgcaggcctacaggcccacggcagcgtggacgcagggtcagcgggtgctgtctgtatcaggtgtgactgctgccctgcgttgctattcagtattagtccggctggttgggttggggaggaatgggcagagaaatcagcccaatgagcctcccctcctctttccctaaaagtaacagccacgggctctggagaacacggtgtgaaaaccacaggagggaggcaaccctcaggcctttgctggctgtaaggcagtgatgctactggaggggaagtgggaggcctgtgaaacgccctgctccgctcagtcaaatctacccacgcccccaggcaggagcctgtgaccggctcctgggtcacctgctaacaccctgaatctgaccaggctgttcctgctgaaattccaaactccttcacagacagtccacaaggctcccagtgaaagggccctgcctgccccgcagccccaggactcatctcctccctgctccctcgctctgccaagccacacaggcctccgtgaggcttgtccctgcacctcaccaagctctgtcctcccttcagacctttgcactgtggttccctccacctggagggctgttccttctcctcccatcccacatgactgcctcaccttgccaaactgggatcagctcagaggccctccccacagccgcatgcatctaaagaagtgcccagtctgtcacctgatttgaattcgctgcctagctcctccccctctaaccggctccttgcttattaacctgtttcgggttggtcttgcttagccccacaaggatagggactttggcaagtacactgctgtattcccagtactgatgcaacgctggcacatacgaggtgttcagtaaatggtggcggatgagtgaaaccttttcctcggctccacaatacccttaggatccatcctcacctctcacccaggcccacaggccagtgcagcacagcccctgccaacccctgcaggcacttctgctgctccccctgcccaggcccagccttcctgccactcccagagctgtgagctgtggtgggctgggaaccaggggcagtggcatgcacctacggtcccagctactcaggagactgaggcaggaggatcacttgagcccaggagttcaagactagcctgagcaacatagcgagactcccgtttccacaaaaaatttaaaaattagctaggcatggtggcatgcacctgtagtcccagctactcaagaggatgaggtggaaggatcactaaagcctaggaggtcaagcctgcagtgagctgtgatcacaccactgcactccagcctgggtgacagagggaggccctgtctcaaaagaaaaaaaaaaacaagcacagagcctgacctctgaaaagactccagtgtgtctaccttggaggcgctcagggctgcaaagccactgcgtggaagaggagtgggcccgggagctgcccttgtcagttctgacttgattgcatgtctcccccgacctctgtttctgcatctgtaaaactgagatgctaatttcagccctgatctcctcctagtgctctctgacacggttctgtgaactggcaaaggccttcaaagtcccggcagaaatactaagaattacaattgctaagacagaccaacagctcaccatgtgtcgggcactgttcttagtgaggagacatttccggtaggcttattgtatgccagaacagttatgaatgcttcccacaaattaatccactcagccttcacaataatcctatcaggtgggaattatcatcatccccatggcaccgatgatgaaatgagctcacaagggttggggagcctgctcaaggtcacacagccatggagtggcacggctggatttgaaccctgtgctctcactcgcttccatacacctctttacagaggctggaaaccagaacattgaagttctggatcctagctgggccaggctggggagctggatcccggaatgctcgaggggaccaaaagtagggggtgggggaggctggatgcctccgttccataacataatcatgactgccaaccaagacttacacagtaccaggcaccattctaggagcttctcgtggattaattcatttaatcctcacaacagcccaaggtggacgtccttctgagaccactgtatgggagtgaacagtgtggtccaaggtcgcagagctagaaccgacttcaccgtcctgctgctagctaacgcaggtccctggtagctgtgtcaccccctgcatggctctcttgctgtcttcttctcccagcacacacctgcccagggttaaaggatgccttgcctccactctgaggagggaccaagaaatgctggactggctgtaggcagagatgctcagggcagcctgaggctcaggggtaagaggaaggaaagacataggacagtcacctctataggtagaggacagaggacagaggtgactctatcctatgtctttccttcctttcacccagcctggaacctggtgagcaaggaatgcatggcactaggggctcagtgacctgggttcaaatcctaccctggcacccatagggtctgataagatgcggtggaaggcaattcttcctctgaacttcaatttcggactctgcaaaaaaggacacaaataccatataaagcccaaagcacagggctgggcagagtatatgctcacagacaaaagccactcctccagtttctccttgacaagacgatctgaggccaaggttggccaagggctcacatcacacctctcccacttcagctatgagacctctgggaaatctttgcacttcacagtgagtgaaatgattcctcatctgtaaaatggtatcacacttctaactagctcgtagctctccataaaataggcctaaccacaggtatgttttgagacttaagtgagatcacatgtacaaaagccctgtcacacgcctggcatggggtgaatgctataaacactgggcatccactagctctggaaatgatctgcctctctgagatgctgttttctcatctaaaagggagagcataacaacagcgcctaccgctctagaattcaagtattcagcaagtttatctatatgaagcattccaaacagtgtgtggcccacagaatgcactcagttactgtcagccatcaatttcatgattactgttttcactgccactgttagccccatcaggcaaaccctctaaaagctggcaggagaggaccagaggaacaaacccctagtggagaaagattctacagagtcgccgctgcctcacagactgtgggacctttctctccaggaaccacgagccacggaagccagtcagcttggaagtcactgctgcggactaggggcaaccatctgccccctctgaccacatcaccagcccaggtctgctgggtcaatcagggactgcagccagtcctctgggaactccagacccagagcaaaggctacagggcaagccaaggtcatgatctggcctagggagcagggacactggccacagacctctggggctggctgctcccagcaccagcccacagaccacaataagacaccagatccatgggggatctgactgtcccaagcccttcagagcagccttcctccctgggccaggctgggccaggggcacccccactccaagtccccttggcctatgcaaagaggaacagctgggaaaacagctcccggcctcactgcaaggccaactgttactgccttggtggggagtgtaaacatgatgtgtgaccgagctggtaactgggagacacaaacagcttcgtggccagcgacagaggagcatgtagtggtctgcgttggttcctggacccttcacatccactgccaaccaagttcagcccacgagtgaactcctgctgcttctctgggaaggtaggagtggatgaagttgaaaagcagcccattggaggctctagttactccagcccaggcgtcttgctgagccccaagaggtctccaaatgagaggaagaggtcctcacaatcccaagatcaagatgcccccagagagcttccctggggggaagaggtgttcccccaaacactccttcctcccaagttttaacaagcgggtgcaggggcacggctcctcaaatccaagcccaatccctcttcctcttcagaatgttaaggctcagacaacttcagtgacttctaacacagctttcctccctcccctatggaaggaaagaactgttactgcctggtaaataatctgagagggtaatggaatccagagcagcacctccatggtccaaagcaccccagtaaccatgacgttccctccagagtcgttaagaagttcaataaaggctgagatcagtgtaaacccccaacgccacacacgtcaaatacaggaaacagaaacccctcctcaccaatcggcatcacagtcctcccaaaatacgcccctaaaacccactagggcctgtcccgccccgtcccagtcccttaaagatcacaaacatcacagtcctctgatttgggttcccctacgttctaagcagggctcccccaacgccgtggtgatataacccagccacagttggggaagcatcctccccagaagcccccacccctgtaaatacagcacagcaacggcttccacagcgccaaaaaggtacagccctctacacttgatgcggcgcgccccctcgatagcttagcccgcgcacgccaggctcgatctgcccgccgcgcccgaaaggtccagcccccggcccgcgcacgctgcggcctgcgctccccgtcccgcaaacttgcagcgctccccccaccgcctcagtggtatggcccgccgccaccgccccggccccccgaggctggtcccaccgcccccgctcggccacccccactcagctcctgaaggaggggctcgagggccgcggtccccccgccgggcacgggtggtacagcccatcgcggcaccgcggggggcccggacgcgaccatcgtggggggggcgttcggggacacgcgctggcgcactcacctgtcaccggcagccgcccagcctctccggcggggctctacccccgcccatcgccacgctgcgctggttccctttccttgtgtttcccggcagcggcaacggcgccggcagcggcagcggcggcggcgacgcctcctccgaggcaggcccaacggctagcacggcgcggccccccccgccccctccccccagcccccgcttaccgccccctcccaccctctggacggaaataccgccctctcgcgccacaaacaggaagtgacgtacaaagagccagagacgaactctgagagagcgagagcgcaagagcagggcagagaaggaggcgggctcacagcagggcgcctgcgcacattagacaactttgggcctgtgtgggttagagatgggcctcgctaggccgtggggcggaaaggcgagatggggctacgcaggcgcactaggactccgacgtctgctttccctagggcctagccgtagtgattatttcccggcagcccctagtccgtatttacatacgctttgatcttgttttactcagttctgggttctgacgctcttaaaggaccccggagcgggagttagttaggaggggtttccttttcagtgtgctcgtcatggttgagctcaggctctgaagccacacaaccccagacttgaatttcctcctttctggtgactgtgggcagaaggcttgaccgttttctgtgcctcagtatccacatctgctaaatggaaacaatcatcgctgtgtcgctggcttttgaaccattttaatgtaaacaaaacggtttttaccaattagttcattactgcaagatattaatgccacctgctctcatcgtacatattccagtgaatctgggatataacattttataatgcaacttgggcccataaaggccttaaaatcaccctgcggccgggcgcggtggctcactcctgtaatcctagcacttggggaggccaaggcagacggatcatgaggtcaggagttcgagacagcctggccaacatagtgaaaccccgtctctactcaaaatacaaaaaaaaaaaaaaaagccgggcatgtcggtgtgtgcctgtaatcccaactacttgggaggcttgaggcaggagaatcgcgtgaacccgggaggcagaggtttcagtgagccgagatcatgccattgcactccggcccgggcgacagtgcaagtctccgtctcaaaaaaaaaaaaaaaaaagaaaagaaagaaaaaagaaaaaaaatgaccctgcaagaaaagagctttgcacagatcctaatccgtatattagctagtatactggacagctgtgagacatctggctcccagcccctcctctctcataggggattgtgctgcctcctgaatttgggttccagtatgccatataacttggcaattgtatgcattggtaagtgagaaaaatgcctgactgagagttgaatcctgggtccacctcagtctgtgagagtgtttcaggcaaatcctgctgagggttcggctttcgttttctgagacgtaaacctaatgctggaactagccctttcttatttggtttctagcttggaacttgctgcttggtattcctaattcccggtcttccccatcagtcggtgttaataactctgaccaatgcctcccccttcacagccctaaccattttcatctattactgtctggtgacaggtctgtttcccccactgcacaggaaacacagtaaaggaagagaccaagactgtctcagagatcagtgtgtatccaacattgcccagagtgggctcttgcagaatgtttgtttcaagcattagcccttctgccctaatctagactcaaggttactgtgaccaaccctcttcactcctgtccacactgaacagctcacaggccattcccctacgtctaagtctcccctgggccaacttgaatcctagcccctcctagggcacttaattatgacacactgagatctcactgaaaccacccatgtgcttgtgtataaactccttgcagcactggtagtcaagggcagtggctttctctttttttttttttttttttttgagactcactgcatcgccaggctggagtgcagtggcgagatcttggctcactgcaacctctgccctctgcctcccaggttcaagcgattctcctgcctcggcctcctgagtagctgggattacaggcacgcgccaacacgcccagctaatttttttgtatttttagtagagagggggtttcaccatgttggccaggatagtctccatctcttgacctcgtgatccacctgccttggcctcccaaagtgccgggataacaggtgtgagccactgcacccggctctttctggttttggttttttattgtttttttgagacagggtttcaccccctccgtcaccgaggttgaaatgcagtggcacaatctcagttcactgcaaccgacacctcccatgctcaagcgatcctcccacttcggcctcccaagtactgggaccacagatgtgcgccactatgcccagctaatttttttgtatttttggtagagacggagtttcgccatgttgcccagactggtctcagactcctgagctgaggcgatccacccaccttagcctcccaaagaactgggattagagatgtgagccaccgcacttggcctaatattctttttttttttttttttttttgacacagtctcactctgtctcccaggctggagtgcagtggtgccatccgccatctcggctcactgaaacctccgcctcctaggttcaagtgattctcctgcctcagcctcctgagtagagggattacaggcgtgcaccaccacacctggctaatttttgtatttttatttatttatttatttttgagtctgagttttgttcttgttgcccaggctggagtacaatagcacgatctcggctcaccacaacctccgcctcctgggttcaagcgattctcctgcctcagcctcccaagtagctggtattacaggcatgcaccaccacgcctggctaattttgtatttttagtagagatggtgtttctccatgttggtcaggctggtctcgaactcctgacctcaggtgatctgcccaccttggcctctcaaagtgctgggattacagacatgagccaccacgcccagcccttaatatactatttatttcaattccgcaaccctgctgaactgattttctggttgtgccttgtagtttgtaaaacattagtctaggaggtaaacaacactttttagcattgatgatgagtaggcccaggttctaatcgtatcttttctgtgtccttgtcaaagtcacttcacttctctgagcttgcctttctttattctattaagacagtaataatataatttatttagcaattgttacaggccaagttctgtgtaaacacactcccactgatgctatcctgttgctatctacacagtaaccctggaggttaaatgtaacagcacattaagggccttgcttgagttcccaggacaagttaaggacaaagacagtatttgaacccagacagtttgataccagagcctgtgctcttaactcaactcatgctagaaaatggaaaagtattggccctacttttgtgccctatgttacttctgcaaatggcttagttatctttggggggcctcaaaggccatcctgggcaacatagcgagactctttctctattttcagcatcaagggtgaaacttgagggccactttgaatcttgtggcagggcaacacagcgagaccctttccatttcagcatcaagggtgatcgatcgaggcgactgggcatggtggctcacacctgtaatcccagcactttgggaggcagaggcaggtggatcacctgaggtcaggagttcgagaacagcctggccaacatggtgagaccccatttctactaaaaatacaaaaatttagccgggcgtggtggcaggcgcctataatcccagccacttgggagactgaggcaggagaattccttgaacccgggaggtggaggttgcagtgagcggaggtggcaccattgcactccagccttgtcaacaagagcaaaactctatctcaaaaaaaaaaaaaaaagaaagaaaaaaagtgtgaaccagaagaaaattccctacaacctcaccccattttcttccatcttaatctagtctataaactctctccccataactataagtatggactgcacatgcactttgctgggtagagggggccggtaacttattgaaagctgttcaaaggtctcttgattcagaaaaaagaaaacgatgagggatcttgccccaagggttggagaggacatctcctcaaagcccccttctgtgcccagggagtagaaatcaggcccaggagtccattccaaggcttctcacagaggagtctccttatcgatggcaactggacaagctgtggggactagtcacaaaataatttttttttttgagatggagtctctctcagtcaccaggctggagtgcagtggtgcgatctcggctcactgcaacctccacctcctgggttcaagtgattcttctgcctcagcctcccgagtagctgggattactggcacccacaaccatgcccggctgatttttgtatttttagtagagacaaggtttcaccatgttagccaggatggtctcaatctcctgacctcgtgatccgcccacctcagcctcccaaagtgctgggattataggcgtgagccaccgtacccggccccatttttattttttatttaaaatattaggctggacacagtgtctcacacctgtaatcccagcactttgggaggccgaggcaggaggatcacttgaggccaggagttagagaccagcctggccaacatggcgaaaccccgtctctactaaaaatacaaaaattagcccgggaggtggcaggcacctgtaatcccagctactgggaggcggaggcatgagaatcacttgaacccaggaggcagaggttgcagtgagccgagactgtgccactgcactccagcctgggtgacagagcgagactctagctcaaaaaataaataaataaataaataaataaataaataaaatatttaaaagagtttcccacattataaagaaatgccaaaatcatgtatttgattcccgagccagaatctacaaagcccactccccactgcctcccccagatactaccgtgttgggaagatcctttcagagtaatgttattaatatatttggcagaagtacatataagcatcagggattccgcaaatgttggttccaatttccttttttaaaatttgtttctttttcaaaaattgtaatggaagacacagtgcacattcaattttctaatatatcggagattctcgaaacgtttaagtccaggtgcagcatctcaagcctgtaatcccagcactttgggaggccaagacaaggagatcactcaaacttaaaacttcaagaccagcctggataacatgacaaaaccccttctctaccaaaaaatacaaaaaaaaaaaaaaaattagtcgggtgcagtcgcacacacccatggtcccaactactcaaacaaaacaacaaatatttaagtggtcatgctaggctagtatactttgtgtagaccttgggatgaagctttctctgctcttttttctttctttcttttctttttcttttactttttttttttttttttttgagatggagtctcactcccgtcgcgcaggctggactgcggtggtgcgatctcagctcactgcaacctccacctccagggttcaagtgattctccttcctcagcctcccaagtggctgggattgcaggcgcccaccaccaccccaagctaatttttgtatttttagtagaggtggggttttgccatgttgtccaggctggttttgaactcctggtctcaggtgatccacccgcttcggcctcccaaagtactaggattacagacatgagccaccaagcccagcctcttttttatttattattttactactattttgagacagagtctcactctgtcttccaggctggaatgcagtggtgtgaacacactcactgcagccttgacctcctgggctcaagcaatcctcccacctcagactccagagtagttgggaccacaagcgcacaccactacgcccagctaatttttttttttttttttttgagatggagtttcgcttttgttgcccaggctggagtgcaatggtgtgatctcggctcactgcatcctccacctccaccacctgagttcaagcgattctcttgcctcagcctcccgagtagctgggattacaggcatgtgccaccatgcccggctaattttgtatttttagtggagatggggtttctccatgttggtcaggctggtcttgaactcctgaactcaggtgatccacccgcctcggcttcccaaagtcctgggattacaggcgtgggccactgcacccggcctgcccagctaatttttaaattttttagagatggggggggtctcaccatgttgcccaggctggtcttgaactcctggcctcaagcagtcctcctgcctcagcctcccaaagtgctggaattacaggcatgagccaccacacccagacttttctcctctcaataagatcaaacacctttatcaatctgcttccaacacatagatggcttccaatcccatgtggaatataaaccaaaggcctcaccgtggccttcatggctgtatatgatctgtccctgcctgtttctctaacttcatcacaaactactcttgtccctggcccatgttccagacacacatacctcctctctgcccctacaaaaagacaagcatttgggaacttgctgtctcctctggctggactcttcatgtccttgatcctgatcttggcatgactggctccttctttcttttctttcacaactctgttcaaatctcacctccgggtgcagtggctcatgcccataatcccagcactttgggaggccgaggcagctgggtcacctgaggtcaggagttccagaccagcccggccaacatggtgaaatcctgtctctacaaaaaaaaatacaaaaattagctaggcataatggtggctgcctgtaatcccagctacttgggaggctgaagtgggagaatcgcttcaacccgggaggcagaggttgcactgagctgaaatggtgccactgcattccagcctgggcaacagagcaagactccgtctcaaaaaagaaagaaacaaacaaaaaacccaaatctcacctccttgtgcactccgagtctaaaagggccatgctgtcactatgtttgtaagcatatttgaatcctctacctaggacttaacactaaaatatttttgttgtttattttgtgtcctcccccaagccagaatatacatttgctcatgaggacaaggactactgggtaccgctgtattcccagcccatggaagaatgcctgtgaaagagttcaggacacaccaccccaatatatgcccatttgatatgctgattacttcaaacagagggaactcaggggaacagtaagtgcagggactttctctgaccttcccttacctgtctgcacacggatcctccaaaaggaactccattgtcatgaatcccctccccaggaatcttctcaatcagagaagatgagctcagatcacaggagaggagaccggaggttgacgtgatgcccagactgtcacctattcttccgggaaaacttttcttaactaatagacaatctgcataacaacttttattcaccatacacctcctccctgcaccctcccataacttatgtcaccaccacctcccaaaagccccaagcccctcttcttttctgcaggtcaggatgctatatgataagcttcaatcctctgacacttctttaaatctcatattttgtgggactctcacgtctaagtatgtaattttttttttttttctcgagatggagtctcactctgttgcccaggctggagtgcagtggtgcgatctcggctcactgcaacctctgcctcccaggttcaagcaattctcctgcctcagccttccaagtagctgggattacaggtgcccaccatgccaccacgcctggccaatttttatatttttagtagagatggggtttcactattttgcccaggctagtctcaaactcctgacctcaagtgatccgcccgcctcagcctcccaaagtgctgggattacaggcatgagccaccgtgcccagcaattttttgctactttttgtttgtttttgttttgtttctgagacagagtcttgctctgttgcccaggctggagtgcaatgatgcgatcttggctcactgcaacctccgcttcccgggttcaagcgattctcctgcctcagcctcctgagtagctgggattacaggcaagtgccaccacaccaggctaatttttctatttttagtagagacggggtttcaccatgttgatgaggctggtctcaagctcctgacctcatgatctgcctgcctcggcctcccaaagtgctgggattacaggtgtgagtcaccatgctcggccttttgctactgttaatctgccttatattggtttaatgtgtaagccagccaaagaacttagaagcatagcaggaggggccgggcgcagcggctcatgcctataatcctagcattttgggaggccaaggcgggcagatcacgaggtcaggagttagtagaccagcctgattaacatggtaaaaccccgtctctattaaaaatacaaaaattagcaaagcatggtggcacatgcctgtaattccagctacttaagaggctgaggcaggagaatcgcttgaacctgtgaggcggaggttgcagtgtactgagatggcgccactgcactccagcctgggcgacagagcaataatccgtctccaaaaaaaacgggtagcgggaagccatttttcactcccttcgagtttctggtgcccaacgtggggcatctttcactttttactctaggactgcttcagcagcaggctcctgacatgcctgaccaaacactggccacagataagatttcctaccacattagccccccagatctctgcctgtagagtccagcggaagcaagataggtaagggtctctttgtctttttcccttttctaagtttggattagcaggagaaaatgtgtgcgaactagttcttgtataataactctggtttttttgtttggttatttttttttttggtggtgaggggaggtattattgttttctgattcctcccctcccagagatggtcattattttcccatgtctgtgtcttttgtgttgtgtcatacagaagagaatcatagggcaagaacacaggcctcaaagactggtgagttcacagttctctgcaaaccaatgtctgttcagactaattttgctgtgggtccccaagacaaaaaccagatgaggtgctccttgggtcttgttttatgtcctcagagcttggcttttccatcagtgagaacactctggcctctgccagctgagggtgcaagtgtcagcctgtgtcagccagccagtcaaataggctggaagcccacgatgcagtgacaagcggcattctctttgtccactcgtgccagctctcaggagagtttggtcccaataactgtcccagtccgtagggctttgttgtctcaaccttcaattggacaatgctaggaaagtccaatcccagtagtgcttgcccggtgtcacagattagcgggtcagtgagtgtcatgagacaccatttacacaaacactatccttaatgcctgtggcaacaaaggtctttgctttctttttttcttttttgagacggagtctcgccctgtcgcccaggctggagtgcagtggcttaatctcgcctcactgcaacctccgcctcctgggttcaaatgattctcctgcctcagcctcccaagtagctgggattacaggtgcctgctaccacgcccagctaatttttgtatttttagtagagacagggttttaccatgttggccaggctggtcttgaactcctcacctcgtgatccgcctgcctcagcctcccaaagtgctgggatgacaggcgtgagccaccgtgcccggcctaaacagctgtcttattggtacctatggaaagatcaaga

SEQ ID NO: 400 - DNA, 33575 bp, Homo sapiens
aactgactcaggctaacactagagttgcctctagtaggtgtaattatatcatattttatagatgaggaaactgatgaacccaaggttacataactggtaaattacagagccaatatttaccaatcttgattccaaagcccagactatctgcatgatgtcatattgactccatttacttatcaagagttgaagttgactggaatatacagtagccaggaacagtactgctttttgtgaatgtgtaattcaagagtaagtgattagaaggttcttcaaaagctgatgcagttgatctctgagcagagttgaatagtgaatattttcagtggatattgcccactgattcaagggagtcacccgtgtggttaggtctaatagtgagtgaggtactatcaaggcaaaaattgaaagagttccagttacctattgctgtgtaacaaacttaattaaaattaagtaattttaattacttaaaatcaaccatttcctatatcatggttttgtgaatcagaaaatccaggaagggcttgtctgggcaattctcctccctgtgacaacgactcaggtcacctggtggtattcagcaggtggttagacaagtctggaaggagtgtccaagatgatcgatcttacatacctgacactttggtggggagactagaaggatggactcagcaggtctcctctttctctccatgaagtctaaggactctccatgtgttctcttcatcaaggtagtcagatttactacgaggacagctaaggcctctgaaaggctgggcagaagaatctagtcaacttaaaggccaggcctagaattatcatacagccaccactgtactcttggtcgaagaacttaatggtaagatgacagcaagaatgaagggggaaaaaagaactcaatggtcagcccaaatttaaggagagaagaaataccctaccactttatggaaggcatgtccaggacttggggctatttttaatgtgttaatgttttttttgttttgttttgttttttgtcttgactctttggtgtttattcatcagttgtttgtgctgtagaaaccatttattatgtctaccatgggtcactaaaggagctagaaggagaatgagacaaatatctggagcatacttcatttgctgccctctccctccaagtttcatttatcttatagcaaaattttcattttgtactgtgttccaagttgtgaacatttgcctggttttgctctgaagccacggtaactgcatgcggagctagaaatactctagagggagtaaaaagcttacattttttttgtttgttttttgttttaggacagagtttcactctgtcacccaggctggagtgcagtggtgcaatcacagctcactgcagcctcaacctcctggactcaagcaatcctcctacctcatcctcccaagtagctgggactccagacgtgtgccactacacctggctaatttttgtgtatttttagagacgggatctcaccatgttgcctgggctggtcttgaactcctggactcaagagatccaccttcctcggcctcctgaagtgctgggattacaggcatgagccaacgtgcctggcctggaaagcttactattaaataatttgatttcttggagatatcagttgtattttaagtttacaaataggtgaatactcttgtggtatggaaacattgcatggctgctgaatctctttcaacaggagtttctattgggtggctacatggatcatattcttgagatagtgaaaagttttacctacttatcttaatcccattctacctctacacctccagcatgattttgtgctcgaagatgaatcaattcctttcattcttgttacctttcatacaggaaaattcatcgcccaattttatatgttgttaatcttttaaaattggcagttgttaccagcctctctcatttaaaataacagatcattgaagttttttgatttttggttagatgtgtcagatttaggatgccttatttaaactcgtgctgtcttactagactgttcctgctctgagaagaaatatggacagagaatgaatttcattgtccatattgatgaaccccaaatcaatacacttcttaagaaaggtttgagattatccagtccatgtgcaatgaatccttggagcattagctgtgtggccttcctactgataatctgcagttatcacagtaaagagatctctgttcctaggtcaggccttagcaattacaaatacaggaaataaaggggtactcaatgctgaagacttaattttgggtacctacaaagtcctgggaagggaaaaagaagaccttggcatttgtatttgcataaccagagatggaatgtttgaggcttttaggcataaagattaattagattttatcatataaagattagggcaaattatttttttttccagttcattcttaacatgttaagggacaaattttaatgaataaaaatttaaaggccttaaaactttcttttggattcacatttccactctggtataatccactctggtgtagtctgccctttatgacagagaaagcctttgaaaatattgtcccagggaatgaaaaatcttaatgatgatctatggaaatgtctctcattctctattacagccctttgggccctcctatagattctctgtgaatttaagtttgaaatcatttggtgtttgcatgaaaaataattcttactattcatttaaataattcttaaatgtggtcttaaattgcaagagagaacaaagccagaaaaaggggaaccttgtagattgaccaaatatttattctttattttcagcatcacaaatctaaaccatttcaagctaatacaacaacctgagtgagtagaaattccttaaggtttagatttctgcttttagtcacatcttgaagcagatgtttatgacatatttgaagatgatccactgagtttcctataaagtaatagaatcctaactatagtggttctttaagaaccactgaaaaaacagaattgcagtgcagggaacaaagcttaaaatgtgtttcctctggaagccaagatgctaaaaaaggggtcactaatagtgtgactgaagtccgtctctagaatggctatctgttagatagcagaaatatttagaatgtatatggcatttctaatatttttacaaaaataattttaaatcatgtaactcgaattttttttaaaaagtctgttttctttttggaaaactggcacaataaaaataacactaatataattccattgtatatgcatgtgcattgaacccagagtgggtatactaaagatagttcatgcaaataacttatgggaagtttggctattttttcatgtatgtttataaatatatttagtcatctactgtgaccttggtagcacagaagcattttgttagctgtatcattaattctaaaaatcaaattcttggcatagtaggctatgagagctttttgttacttggtattttggctaagaaaattatttcttgcactttctatttgtaaagatgttataacacaatgcacccacttaatgcagcttttctttagagaaaaaagatgtaggtgtaaaagtgaaatgtatgttttcaaacctggcaaaaggagggacctcaaaaaaataaatttggcttgccatctacctgagtagggttggggattaatataaaacttaggttgaaagtggctgttgggataggtatactgttgctgtgaattgcaatattgctgtgagttgccagctatgtatgtgtaagtttatgtgtgtatgtgagaaaaaggtatttcgtgaaggcataaaagtcagtgtagaatatcctacctcccactagagactgagcatattcaagattgctctgtagtcccttgggcaggaagctggattcctcagccactgtctaccccattcttctctatactcacttcagctcctctacctctgagcacttggctgaagaaagagtatagctttctgtagcaagcaaaggaaagccagacccaaaatagagaggctgcagtatctgaaattcttatcatgttcagatatcaatatttaattttgttgcccaaatcaaacaatgtcagaacacttgagtttagtgcttttttttctctctctgtctcctacagacttctcccggtttactgcttttatccactggcttctgtttggcaggagtagccagtggaggtcaagtctgtttttaaagactaaaacacctaattccttttaatgatgtgtaacatttgtttgaatccccaacttctttttttttggggggcaggggtagagatggagtctccctatgttgcccagtctcgtcttaaacatctaggtttggttggatgcagtggctcacacctgtaatcccagcactttgggaagctgaggtaggcggatcacctgatgtcaggagttcgagaccagcctggccaacattgtgaaaccccgtctctactaaaaatacaaaaaattagctgggtgtggtggcggcatctgtaatcccagctactcgggaggctgaggcaggagaatcgcttgaactcgggaggtggaaattgcagtgagccgagatcacacggttgcactccagcctgagcaacaagagcgagactccatctcaaaaaaaaaaaaaaaaagtctgggctcaagcgatcctaccacctcagcctccccaaagtgataggattacaggtgccagtcaccacacctggcccatgatggattttcagatgacctcttttacttctaatctctccaaagagagatattcttgtttttaaggtcaatattgtcataatagtcatgatgtcctcacctgaatgttgtaggtgtcagaaagttgtttcaatagtaatatgccaccaggcagaccacctaatctttaaatccagttgtagcactcaatttattttctgtttggggcactagtgcactgagccaagtcaacttgtccacttttctaatatttcttacagctaaggaggaactgttggtcctttgatatcctagaatgctttctacttgtggaaatgctttttaccctaatacactgattatattgtctaaatgtctaaacagggattctctggttagaagtgaaatgagagagtgacccattttcagatttttagagattggctcccgtattttaggaactagctgataagtatttagtttcctggtgactttggatacggcaagtggagatgcagagaatgtgaaattccaaataataagacaagcattactcacaaataacaactgatacagtaatttctgcccaaatgcagtaagaatcttgtagggagatgaagtggtaaaattaaattatatgaatctttttaccacgactatttttttttttctacctgtagcatagttctctgcctataagccatgctaatatcctagacccaggaattaattcctgcttaggaaaatttttccttctggcttatcttttgtttgtgcccagagttttgtcctaggcctgtcccctgatcttttgctataacacatacttaaggtgcagccttcttacctaaatcagtactttactgttgctgttgctgcctattacagccagttatttatttaaaaagtagtgaaaaaatgcctaggtagtttgattgcagcatgttaaatccataaatctggacagaagccatggagtcttaccttttctctctctagcttggatgaacaccggccttatgctttctattacaggactagttgacccagttcttcatattggttgcacattagaattgcataggaccccctctagacatttacattttattggtctgttgtgcaacctgggctttaggtgattctaatgtgcagccaaggttgagaatcactccctatgtaatccctagtggtcatggcaggataacctcaatccagtcctctttgacctgaaaatatctttattgatattccatgcatggctctcaattcaaagtgtacagtgggtcaaggcttaggtagtaaaatggatcatccatttgtcctcagaataattctggagggagatattgtcatccatccagtttcctctctataccaaatacaaagtacacataaataagcaaaacaaattttcaaagttccttctctagaatcctctttcttttgcatatgtagtttcagtggagatttctcaactagctgaaatggagcacttgaatatattaaaagagcccaaactgcttacagcaatttctatttgtaaaataaacaggtggcattgttaatggagaaaaggaaggatcctgcctgtggtgatggtaatatgtttgattatttatctcttagcctgtcttctaagtgggatttcagtgtcagttaactttcacttttcttggattgtttttttgtgaatgaaatgaactagttaaggcttaagtatttctgaataatatatgaaatgtgaaatgagtcattttaggatctttcttctgggatgtcaaagacctaaccaagtaactcccaaatgaggttccagattcatttttctcatcccaggtagtaaacgtgttttaatgggtttgtttcttgcccatggcaacctcaacacagaggggagaactgttttattaccctaaaatagtgagaaccactgttcaaactaactagctaccaagtgacttctaactcatgaagaaaatttgtatttaagagcaagttcaaatgtagcaggctctcttctgagagtattctggataccacggaaagtttcatttatatattgcttacaagtacgtggtaatttgaacttcagtaggtgatatgtgcaaggagaaaaagtaggtcaaggagaaagttggttagtgcagaggactgacttagcatcagtctgtgaaatttcattaaagtagcactaaggcctggctgtttgcttagcatgtaaatgctgcagtgtccaagaaaatgcctcctatgccttagaaaatttgctgaaggcttcctgttactggtggagtagaaaagcaatagcctttgagactccaaagagagtagcccccttagggttttcatactgaagaaccttgtggagtactgtgaaacattgttgaactttatgcaaattatactgcactggattttaagattttatggggagagagtagagcagagtggggaagtaatgataaaagataaatacgtaaacttgtactatattttaagcaaggaatgaaacaaattccctaacaggaattccctgtcagcactgtgaagtttggtcaagttctgcctaatgggttggcttgctgattcctcttaaacctctaggaaatcctttctaagacagcaaaacaaacgttagtttgagtactactatttcaccaccctgctccatccccctactctcaacgaaagaaaagcattcccaaactataggcaaaagaaatgtgttctcagtccattaatttttcatctgctatgatctctgttcacagttttagcacattgcattattttgtaatctgatagcagaacatcaggaactaatggcttccttccctttaagaaatcttaaagttagaacttttttttttttttttttttttgagacagggtcttgatctgtcacccaggctggagtacagtggtgcaattatagctcactgcagcctccacctcctggactctatcctcctgcctcagcctcccaagtagctggaactacaggcatgtgccaccacgcccagctaaattttctattttcttttagagacagagtctcactatgttgcccaggctggtctcaaactcctgggctcaagcgatcctcccacctaggactcctaaagttacaggtgtgagccactgtgcttggcctagaactctgtttttggcatttctttctaaatgagtacattggaagaacatttaggtttccaggctcctcataatttctgaatgggacccgctctgctctgcctctgaaaggaggagaaaaggctgagggttcaaagacagaaaagtcaatgtagcagaaatttgatttccttcagatggacatagtctgaaagaaatctatccagctgttctctatggtgcttatatgatgggtgacagctgtccccatctacctgtccctggcactgtgccttcacactggtcactgtgaaaagcagatcacactggactcagaggccagaatccaggacaagatcccccttctcatcttgagcccatcacatctttgtatagctgttaatgtagcatttacttctctatgggaaactcttgggtttttaacccaagaagaaattgtaaagcatttaaactagtcagaaaataagattctgatggtagcgatcaaataaaggaaaatttcacttcctctcagttgatattgattgatagcaaggatcaactatgcccacctcttcctaagtttctaaaggctaccataatatttgtaaacaacaaatttatctaatattttttacaacttgctaatcaaggaggattcatattaaaacagacaatcagtttctaaaatgttatccctgaaagggaatggaatagagtatttttagctgtaagaacctaccagtctgttttttccctttgaaaaaaactaatgtttgagatttgtgtcttttcatctgaagcagttactccattaatagtaaagatgcctcgggaaagtcagtgaaccagaatagtgctcttgcaccactgagggtgctagactggctttgtgcatcttatttcctaagaatatcagtttttattatgaccttaattataaatacctatatataggagtaggattttctctcacccaaccctactttaatcattatcacttaagtgtaaacctccacctccccctctttccctttaccgaaaaaaaatgcactttaattcctaaggagagtggctgttcctggccctgaaaccagattacttcaggaggagagttaaggagggagagctcttaccagaccctgtgaaatgaaccaaatttcttaatgtaaacacacaagtaataacatccacttttaagtggcccccactccatgccaaagggaaaaagaaccgccaaattgaaaaagggttctaaatacctgtcctgattttggaagtttcactggggaaaaactacctaagattattttcacagctaccaatttgtcagaaactttggtggtgttttgtgggaggctgagattttttaaattaaaaatcaagtgaaaacacaaagactctaagacacgatcctgatttgtgtcatttctaagtatcagatttgttctcccttcatttgacaggtgttctcagtctctcctcctgtaagattctgtccttcccctgatgacaagccaatagttcttggtggggttgcatgtctcctagagccccaggacccctgtcgtgtcggggaaggggggagggcaggagggtgggcagagactcgggttgggggagggagttcaaagaaagagtgaaaatatgggtttatataaacatatttaaagcagtttagcaaaagctttctcgttgaacagctttaagaacaatgtgaatgaaatcttagcaacttggttagtaatctgaaaagtctattaatgtatacttgaaattctgtttgtataaaaatgcattttcccctttattttaacactgtgtaaaagaacattatgcatgtgagtggtttgagaattaaatggtttaatactcagatttgaatctgtcttttctgtatatagaaactaatctgtttaaatttttgatatgttttagtgtgatggaaatactgagaattcactctcccttccctttctggctgtctaccatcttttatcgctctctccctcattttcttgatccagatgtggttactgggtaaagaacaacttgaaggcatcattttaccatgtgccccaatagcatgtttcccctttccttgtcttcatttcaaatgcagagtccatttataatgtgagatggaagtagtttgtatttatttttacttctgttcacaaaccaaaaataggaagaggtgcaaagaataagaacattttacttaacacaagggttggctactctgcccatgaagataatagtgttcagaggaacttctcttataaaaaccaggaaaggcctgttggccttgaaagtcaccctgttggggtttagcgaacggccagcaatcacaacagcggtacttgcagctgcttcactgccttcttcatttacctgcaggtcacatgggaaataaaactaaattagccactctgccgttcatttttggcaggtaaatcatccacagacacagcaattcctcaaatgcttttgttttccagtaaaaagtacatttgggtcaggttggattccctccagaatcctacttctactcattctttcatgcagagaatgtaaggtacttgtgtttgtccaagccttgtgctaggtaataagtgtaagagttccattcaggtaacccagaaatctgaatgtacacaggttatcacatttctggctggtaccattgtaaatggttttacagcggattttttttgtaccagccgctgaaagatttttggctcaagatctgaactccatagttgaaagaaacagtttcactcttggagcatcaagatccaagatacagctactccaaagagccactcaggacctagggcctatgaaaagaggtgggttctctggctggacgagatgccattttcttggagtaatagactgaaacaatggtatttgaacatggctgataagcagatctagagggaaacaccttcagaaaattttgcctcaggacccagaatatcactaaaactctgtttctgctcttaatgaaagcacatgattaaccggctccctgggttttgtggagctggttgatgatgtcttctccttccttctcactcttccttccccttcctttgttcctcccttccttacccgctatctccccatattacctatttcatgctcattccagcactaaattattagcttattagcagactagagtgtttgcatgaccaggatccttttattcaaatcagattctggtttttaatggcttctcaggtctacaattagttggggtcctgtttattaaggattcccaaggttttcaaagaaaacggctttgttgtaagaaccatggaaaaatcttacatattgtgtactgggctcaggtggataaaatgaatccagacctctgcttcttcctaatagtaactcagacccctcaaggaggtctgagttgaccacttctaactggagtccttaccagaggatattcaatgagagttaaaaccctgaggactcaatttcccttgcagtcttcctaagtgttctttcttccaaaaatccatgtgaaagagggtgtgagcagtgtcatcttaacttccaaaaccattaatacagcactcttgtaaaatcccttgttctgacctcaatacctctactcttgctattgtcttaaaggtcattgacattcattgtcctatagattatatccccacactgatgatttttgcacttagcctttctgtccactccaactcctgctatcatttgaggcaattaaaatatctcagtaggccgggcacggtggctcatgcctgtaatcccagcactttgggaggccgagtcaggtggatcacttaaggtcaggagtttgagaccagcctggccaacatggtgaaaccccgtctctactaaaaatacaaaaatttagtcgggcgtggtggcgggcacctgtagtcccagctacttgggaggctgaggcgagaggatcgcttgaacccaggaggcggaggttgcagtgaactgagatcataccactgcattccagcctaggcgagagagcaagactccatttcaatgaaaaaaaaaaatctcattaggagacccgttcaacaccctagtctcccatttctttcatcaaacctaatgagcattgccttcattccacttaagcaaacctgtccatggctacaccttggacttgccatctcagaactactctacctttgaaattatattaatagcatccttttctcagattataaccttgtgttctttcaagctatcacatttcctcgctcccgttaaaattccactttcctctgagtttgatccctggatctatatttacttagcaccatcctctgaaacctttctctttgactacaaccttcattcttttcgatttctttgattctaggaacatctctaccattgtccaatctcctatccctcacagcctggctcccgcaaaaaatagtctataccagtggttcccaaatctcattgtgcataagaatcccctgaggagtttagtacatacagagattctcagggcccatcccagaatctccaaagataaagctccccagataactactgctgttggtccatagtttagtgtttacttgagaaccagaagttccacaggctgtacacggctattactctaacacagggttccatgcacatctcatttgggggaacacgttaagtgatattcaaccgtcttctttactgtgggacttgtcagacctcagcatgtcagtgtgtactgttcatctcccatgagaggatatgcatttatttgaccaccttttcgtttcctccagtgtagtctagtgctctagttggagcacactttaagacactgatgcacactcaccagcttccctttcttaccttccatttgctcttcatccattacaattaggcatgtggccacactattctgtcctcagggaaaggtaaactatgggcagtctccaaacttttttttttttttttaagatttttttggtagagacagggtctcactatgttgctcaggctggttgcaaactcctgggctcaagtgattcttccatctcagcctcccaaggtgctggggttacaggtgtgaaccaccatgcccagcccaggagtcttcttactagatgctatccattttcttaaaacttctccctaggttggccgggtgcagtggctcatgcctgtaatcccagcactttgggggtgccaaggaggtggatcacctgagatcgggagttcaagacctgcctgaccaacatggagaaaccctgtttctactaaaaatacaaaaattagccgggcgtgatggcacatgcctgtcatcccagctacccaggaggctgaggcaggagaatcgcttgaacgcgggaggcagaagttgtagtgagctgtcgcaccattgcactctagcctgggcaacgagcgaacgaagctctgtctcaaaaaaaaaaaaaaattctccctgggtttctgcgaccccatactcttctggttctcctcatgctgtaaatttcttcttgatggcctttgctggcttcttttcctatatcaccctccctaaatgtttgtgttcccgcttgacctgctacagaagaggtagtgggagggaaggcagaacaatcacaccatgaaggttttggagagggctgtattatagcaggcctgtggaggccttttgcatgccttaacactggaaacaggccttttccacgtgttcctgctgttcatgcatctcctttctgtaccctaagagagtggggaaggtgtactcacctcaagaaatgccttatggaatgcatctgagacatagaggtcatctcggccttctgcaacaatacctggaaggaagaccggagaagtctttgtgagatgggagaaagttggcttcaacccacagatgggaattcagtttggattaagagatcctttggggctttttgaaacataagaagaaatcctaaatcttcacctaatcatactctcacaatgaatatgtgttaaaaataataaagtactttgggggctgggtgcagtggctcacacctgtaatcccagcacttcgggaggccaaggtgtacagatcacctgaggtcaggagttggagacactctaactaatatggtgaaaccttgtctctatcgtgaaaatacaaaaattagccaggtgtggtggcgcatgcctgtaatcccagctacttggaagactgaggcaggagaatcgcttgaactcgggaggtggaggttgcagtgagccaagatcacgccactgcactccagcctgggcaacaagagcaaaactgcatctcaaaaataataataataataataataataataataataataataataaaagtactttgggcttgttcagcatggctcctgataattcattctcaggcttcagctttttgtgggagagagaaacggcaagactctgttcttacagaaaaaactcactccatccagaaggaacatctttctttccagtctggcaacatttttagttttcaaaactagcttaaagacagcccaatagcacagtggctcacgcctgtaatcccagcactttgggaggccaaggcaggtagatcgcctgaggtcaggagttcaagaccagcctggccaacatagtgaaaccccgtttctactaaaaatgcaaaaattagccgggcgtggtggcaggcgcctgtaatcctagctccttgggaggctgaggcaggagaatcacttgaatctggggggtggaggttgcagtgagccaagattgcaccactgcactccagcctgggggacaagagcaagacttcgtctcaaaaaaaaaaaaaaaaaaaaaaggtcaataaagataaatctaattacttaacatcgtaaacttattttattatttatttatttatttagtgataggacctcactctgttgctcaggctggagtgcagtggtgtgatcacagtacaccacagcgttgacctcccggactcaggcaatcctcccagctctgcctcccaagaagctaggactacaggtgtgcgtcaccatgcctggctaattttttttattttttgtagagaccatctcactatgttgtccaggctggtctcgaactcatgggcttagacgatcctcccacctcagcctcccaaagtgctggtattacaggcgtgagccaccctggccagccaacttctttaaaagatattttaatgtgccaggtgcggtggctgacgcctgtaatcccagcactttgggaagccaaggcaggcggatcacaaggtcaagagttcaagaccatcctggccaacatggtgaaacccatctctactaagaatacagaaattaccaggtatggtgacgtgtgcctgtaatcccagctactcaggaggctgaggcatgagaatcgcttgaacccgggaggcagaggttgcagtgagccgagatcgcaccgctgcactccagcctgggcaacagagtaagactctgtctcaagtaataataataataataataaatgtcagtgaggcctgtgtaatgggaaccacatttccccagctcttaatatctgtctctttgctctgaattccaatgccctttcaaattcctctccacctggtcccatctcctctacctgatacagactcacagggcaccagtgctagctgggcccatggagatccaagaacaaacttcccttttacagaagaggaaactgaggtctcaaaaggaaaagagatttccacaaattagcagtagaaactaggatcagtatccaggagtcctgacttgttgctcctttctattctttctccaactcttccacttttggtcagactaccttgcgggtggagaagggaggaaactccttcctagacaaacctgggagtttggacttttcagggctgaacagatcgacaaggcccatgtcttgcagctgctccttcaaactgaagccgtcctcaatgcggaagcggggcatgtggaccaccagcatcatctcctccaattcatccagccactcttgcagcacctctggggtgagttccttctctaccttggccaggctcttctcaggcttgggcaagatgaggaccatggtgatgtcatcacctttgaagggcaactcaagcacctgggtgccttcagccacgcgccgataacggaacttgccttcctggtacatcatagatgctgaacacgactctccatcagccttgtagaacagttccttccttgtgttctcagggctgaactttgacttccacaggccctggaagagaatcacaaagtaagaacacaaacattcataggaggatagttattgacacaagacatatccatattatagtgttacattaatatataattattcggaaaaaagactggcgggatatgcacaaaaaggttaacaatggctgtgtcagaatgatggaattatgagtaggtttattcataactgtcaaaccttggaagcagccaaaatgtccttcagtagatgaatagacagactgtggtacatccagaccaaatgtaatgctattccatgctaagaagaaatgagtgacaaagccacgaaaacacaaaggaacagtaaatgcattttactaggtgaaagaagccaatctgccgggcgcggtggctcatgcctgtaatcccagcactttgggaggccgaggtgggcagatcacgaggtcaggagatcaagactatcctggctaacacggtgaaaccccgtctttactaaaaaaaaaccaaaaaattagccaggcatggtggtgggtgcctgtattcccagctacttgggaggctgaggcaggagaatgccgtgaacccaggaggcgaagcttgcagtgagccgagatcacgccactgcactccagcctgggcgacagagcgagactctgtcaaaaataaataaataaataaataatagattgacctgccctgctgacctgtacctgtgtagctttcggcagtccatttgccctctcagggcttcggtctcgccatttaaaaaaaaagggggtaagctgaagagcaagaggaagtccctggggtctctccagggccattctgagtaccttgaagtaaatggtgttaaccagcaccagaacagtgagctcattgatggcttccgagggaatgacatcggtgattcggccttcggtcttattggacacccatttgttgatggccgctctggattgctctgcattttcctgaggagaacagaaaataaacctactcacctgtgctattcaattggcttctccattttcccaggcagcattttatttttctcaccatccctctgtcctttcccaccatttgattaagaagccattgctctaacccaaattggggaagcctcacatatctaatatagttccatgaatctttcctgtagttaataaatattatcagaagaaaaagaacaaaaagaaataggaagaaataaatgaaaagaaggaaggcgaaaatagtctgggaaaaagaagataaaatattattttctctgactttggaaaaccttaactcacaaaagtagaatttccaaggcatgtgccaggggaagcaatgaatgattgcaggttatatggggttggcaggttatatggggttggcaggttatatggaggagagaaatgcccatgcagtcaaatacatttgaggaatgccgattgaataaagccaacagatttctttgttgcagagtttctcagaaccttcataggcccatgtgcttcatgaatctccaagaggagaatgtaacatgcatcatgtaccaactttatttgaccatgataacagttcaaattaagtaagatatcttgtagaactggcatcttcaaaacaccctttggtatatatttgaagttggtggatggaatgaagaattgattattaattcatgttttctgggcagtcactacaatccaagcatggatacctttgatttctcaggtttcaagtaagaataactattgcaggggttctaacttttagtcagccctccagcagtcttcagcagcaaagcagtgtgaatttggatgctgtttctccacctcctcaatctctgagtggagaggaagaactcggaggtcaggggtaacatctgcaactcaccttgaagtccaggggctggagcttggctccatataccaactcactgatgtcctggtaggtctcattgaaggtaagggatttgtctccaaaaaggcgattggctgatactaacttggaggatttgttggcttttcgatagagtcggcagttcagtttggcaaagaagaagtggatctgatcagatgttttctcagatatggtgtcaaacttaaatacctatagaagtcaaaaaaaaatggtggtgggtttggtgggctgcctagttaacatgggtggtgagcacatgctggtcagtctctgactaatagccacctcagttgttaactccttcaagcacagtacctgggacagcataaatgctcaactcttgtgttctgatgaataaaaggataaaagaagaatgaagggtaggaaggataaagggaaaaagagagactaggttgccacctaaagtctctaaacgcctctagatcaacacacagacgttttcttgctggaatgggaaaagtcctcttggtgattctggacagagaagagaatcaggacggtgtccttctcgtaacaaacacttttgtggcatctactggggccagctgctcatggaggctctgggatactggtggtaggggtgaaaaaggaagagtgaatctatcagcaagggattaaacaggctcagaatctaagagctcagggctgaaaaggacttagaagtcatccatgctttgaagttggaatcccccaatgcccaccttcaccatccccaaggcaaaatgggtgaggctgttcccctcctgccctttccatgctctctcctcaggctacaaaaggccttttggttttatctgttctctgcctttggttttcctgattttgctccaataggcactttttttagggggggattatgcttttgatcaaaagcttggtgctgaatctctcttttctccagagagattcagtctcaccctgctttcccaacacatggcgtttgtgtagaggggaggaccaaaggaacatgtgtggtttggaagcagtgttctgttctgttcttcttgtaggaagggttacatttaagatcttacctggggacagagacatgagtgatatggaagtactttgagaccagtaccaatgtatacaaaaatgactgaagggcccagagaaggcagtattatgtgtcttcagagtttttaaatctacaatttctttcaaagagtgaagacttgggttaactcaccccagagccctgagcaaaggtgatgaagttccatggaaattgaccactagaatagaaggaaccctcctaagacccacagactttagtgtccaagtttcaaataagcaccgtataccatcttgaagggactcatgcctccctattgatgaactctgcttccaaagtgtgatccaacttgaagaaagactgtcatgcagccaagccaaggacagattaaagatctagtgtttccatccatgacttgtcatagccccagaggccaacagtgatcaatcaatctatgacatttcatcttatcatgccctacttccctcccacaaaaggcagtggggggaagggggtgggaactaagtcactgagctgaaatgatccatacttcccagagccagaaaacactctcacgtccttgaggcttctcttggctttcctgggcccctggtctcaatataccatcctaggccccgtgcagtggctcatgcttgtaatcccagcactttgggaagccaagtcaggccgatcccttgaagtcaagagtttgaggccaggcgcggtggcttacgcctgtaatcacagcactttgggaggccaaggcaggtggatcacgaggtcaggagttcaagactagcctggccaacatggtgaaaccccatctctactaagaagaaaaaaaattagccaggcatggtgccgggggcctgtaatcccagctactcgggaggctgaggctgagaattgcttgaacccgggaggtagaggttgcagtgagctgagatcgtgccactgcgctccagcctggatgacagagcgagactccgtctcaaaaaaaaaaaaaaaaaagtttgagaccagtctggccacgtggtgaaaccccatctctactaaaaatatagaaattagctgggcgtgatggcgtgtgcctgtaatcccatctactcaggaggctgaggtgggagaattgcttgaacctgggaggcagagtttggagtgagccgagactgcaccactgcactccagcctgggcaatagagcgagattccatctcaaaaaaaaaaaaatactatcctagaatttttttccacgagagcctatatgcctgatgtcaccatatggtaaagctactcttcttccaccagaggagggactggcactacacattgcctggcacagaggaagtgctgaatgaataaataaataaatgatcaaattaatgagtaaacatatagatgaaagaattactgaaaagaagttgagagaagatacaagccttcccccattttaaggtgctcaaaagaggaaaccaggatttaaaaagtagatagccaagattccttggctaattttttaaaaaatgattttcaaagggaattataacacagtgatgttcaaagggaatcgtaatgcataatgagcgcccctagtggcctgcagtgttggttgaggaatcattggacttgggcctatggaagccccaaaggtgctcctaacaaggtggctgggcagaagacctttggtcgtacctccatcagttgctggagggtgtcattacaggcacccagcttggtcatagcaaaagccgtggagatactcaggggtgacaggaaaatgttatcattgtcattcttggaatctgccaggtgctgatagaaagtggtagcaaagcgggaattggccttggacagttcccagacacgccggttggtggcctccgggatcttctgttctgagccctcatcctcagttgccttcttctccggggagcggtaaatgcacatgggattcatgggaatgtcccgcggcttggctgtgcagatgtccacagggctcccgtgacaggtcacgcagtcccagaagccaatgagcagcaaggacaaaagataaaccttcctgcaaggagacaaaatgccaagttaagctaggctgcaacccctagccccactgcccaccacagggttgccccagtaaagcagaggattccagcccacctggtgtggccaagagaaaggctaaatcctttgaaccaagtacaggggcccgggacaggttcagtcctagacttcttgccaggggacagttcagttgcctggacgtggtcatgttggaattagaatcatctgatggttatttggagtattatgtgctcaattccccacgctgggagaaaaaagaatgagaagcttcctgtttgtgacatggaatgtgcatgcctaaaaaatcggctttagtgcccagtgaagagtcagggtggtagggggagccatctacagaaactgtttggggaaggactctgatagatgcagcagagagatttcagcaacacaagagaagtaagaagaaatggatggagcaaaggcaatatctggccgggtgcggtggctcacgcctgtaatcccagcactttgggaggctgaggcatgcagatcacttgaggttgggtgttcgagatcagcctggacaacatggtgaaaccctgtctctactaaaaatacaaaaattagctgggtgtggtggcgcacacctgtagtcccaagctactagggaggctgaggcagaagaatcacttgaacccaggaggcgaaggttgcagtgagctgagattgtgccactgcactccaacctgggtgacaaagtgagactgtgtctcaaaacagcaacaacaaacaaacaaacaaacaaaaacaatggcaatatctgtgtgctgaagattcctacatctctagctccagccctaacccttccactgagctccagactgactatttgctggacagttccaccaggaactcctacaagttcttcagggaaacaggaccaaactgaactggtaattaattctcccccacaggcctgctcctgtgagtgggctcagtgaatcccgtacagaaacctgagaatcaccctggattcctccctctctcctcctcatttagtcaaaccccagagtcaatcagttcaccccagagtcaatcagttctgtttttttactctttcaccagttattgccactgctttagttcaggctctcatccctttttattgcctggaatttttaatagtcgccaacatggattcaatgaaggtaaatgaagctaatttcacattttaaaaaaatgaggtagttgggacactcgatgaagcaaatcaagagataaagtctcttgtaatattttttgtagataagacagggtggggcaggggctgcctccagctggtttatggttcctgcgtgtacacaagggggtctgtgtgtgggtactggatcttcccatcttctcctgggagagaaagacaggcacccagtgcagattcacggacgtggtccgttgggcaagcctggggctggctggaagctggggcagctgagggggacttgccttcttgcgtggtctgagtccagttctgcagccctttcaagaacagaggtgcaaagccggagagaagcagcggcaccaagggagatgtggaaggcaggctgaagaagcagagagagagaggagaggaccctgccattcatcttcccatctccactgccttcggttgcccactctgtccttcaactacatttggaaatgcaatttgaggctgagaggaccctgggagggctatgaagcacaaattaaaaccaagacagttgtgccaccaccccgtttctagcctcctgtgacaactcagatgaagaagggagtgtgtgtggcattgagggagggacaactctcattgtgagaaaaggaagcagttttggccctttagtcaaaggtcactgggatttgggtgggggtggagtggggtggatctgagtggaagaaagagcaaaaagggagtgaggaggtcctcatgggtagcatttgctctcttcccggatggatggcaggccctggggattccccttggagcgtcccctggatcccgtgagtgctgacttcctgcacagcatctttacaccagggatgacatcccccttgtttcttaggctagggacccaaggggtagcttaggaaaggccttaccccaagaggtggggtgggagggagagcacttgaaatgacgtcttccaaacaggtctttgactgtaactaccagggagagggcctggtcttctcaaaggtgttggaggtcattcctgtgagtcctttggaggtcacaaaacccagtaggggcaggcaaggggaaagctcacccctcttacctttttccagaggttacagttcctatcacattggaatacatggccgctaatcttccacagggctgggcaagtggagatagtgtgatctgaggcaatccgcctgaaaactggttctttcctctaaatctcgcagaggttccagaggacagggtggggcagagagctggtcaggagggggaactgaggtcaaaggctgatgaccagttcccagggttaagcaaagtgtagagcccagtgttgtttaattagtagagaagttttaaagttcaatcaggcccagggaaagcctgagccacctctcttgcccacactccctcactcttctcctcagctttatagaaaaggaaaaggagagtatgttcataccctcaaacttggttaggaaactaaccaaggaaacaaacttggttcatacccaccctctctcatagttttctttatggagagagggagagagagagagaaatatctaattagagaaggcaaagagggacaagctgctaccttcaggcatctgagtgccaaggtgtccctggcacagacaaggaaaacacaatggttacacctgtggcccacagagagacccattccccagcagccctgaagtggtgggacagggagagaagagcagggcctcggggtgcatgccaagcgcgtttctaaggggtgtgagcagctgggaaatacttagcaaaactctactgggggatcaggagacagaatgcggggcaggtgaaaaacccacgtacaactgctgaaataaaaacaaactaaattatatttatgtgtatcgttatttttattagttattggggagattgggtaaattcaaactagtggagataaagggcaggtttgtttacatttccctcttctgaaatagccaaaagcaccatcacaaggactgcagccaccaagttcacagggcgcatgtgcctcctgctgtgtgatcaaggactccttgtagttgttgttgcagtcataggcattttcgagagctcttcgttcatgagagaggacatctctcctgaactgaagctgtgtctaagttcttggctgattcagaccctggatcctttgaagccctccatgtgcagtgtgaacagtagccgagaactgtcccaaagggccccagaatgcccagaggctcatctgtcaccctagattaaagactattgaaaagtctcctgttcaaccacttgagttcaacaaatacacgagtgctgcttgtgccagcagacactgttcttggggctgggattccattcgggggagacatacagcaatcacataaagaatcagtattttaggccaagcgtggtggctcacacctgtaatcccagcactttggtaggctgaggcaggtggatcacctgaggtcaggagttcgagaccggcctagccaacctggtgaaaccccatctctactaaaaatacaaaaaatagctgggcatggtggtgggcacctgtaattccagctactcaggaggctgaggcaggagaatcacttgaccccaggaggcagaggttgcagtgagccgagatcgtgctattgcactccagcctgggtgacagagcaagactccatctcaaaaaaaaaaaatcagtatttaaaaaataaatatgtaacgtgccagtcagatgttaataaggtccatagagaaaactatagcagggcaaggatataggaagcagtgggaggaagtggggagggcaccatctgagaacacttggtaggaaaggcctcccttaggaatcattgttaggaaaccagaatgaaatgatggagggggccatatgaatatctttaggaagagctgtccaaagagaaatcagaaatacaaagaccttgaggtttcaggaacatgctgttgagacctattgttccagcttataggagttatgaggtttgtgtcttgccaagaaggtccttgggggagggcagatgaggggccctgcaaaaatataggtgatttggtgaacatcgctggaaaagattaggatgcagatactaccaggtcaaggaattaagaactataacatcagggtttgtgtttaatttgttcatccaggctggatgcagtggctcacatctgtaatcctagcactttggaaggccaaggcttgaggccaggagttcaagaccaactgtgagaccccacacacggtgagacccccatctccagaaaataataataataagctgggcatggtggcatgagcctgtagtcccagctactcaggaggctgaggtgggaggatcacttgagcccaggaattcagactgcagtgagctgtgatcacaccactgcactccagccttggtgacagagtgagcccctgtctcaaatgttaaaaattaaattatatatatattttaaaagtgttctgccaggcgtggtggctcacgcctgtaatcccagcagtttgggaggctgaggtgggcagatcacttgaggtcaggggtttgagaccagcctggccaagacagtgaaaccctgtctctactaaaaaataaaaaaaaaattagctgggcatggtggtatgcacctgtaatctcagctactcaggaggctgaggcaggagaatcacttgaacccgggaggtggaggctgcagtgagtcgagattacgccactgcactctagcctggatgacagagcgagactccatacaggtgtaagccactctgcctggtgcatattcttttcttcttcttcttcttttttttgtttgagacggagtctcactctgtcgcccaggctggagtgcagtggcctgatctcagcccacctccaacctctgcctcccaggttctagagattctcgtgactcaacctcccaagtagctgggattacaggccccttccaccatgcttggcaattttttttgtatttttagtagagacgggttttcaccatgttggccaggctggtctcaaactcctgacctcaagtgatccgtctgccttggcctcccaaagtgctaggattacaggcatgaaccacagcgcccagcattattttcaaatatagtactatttaaaaatctctaaaccttattctaattttgccaatcatccaattaatgtttttagagactggttgtcactctgttgccattagagatgggggtcttgctctgctgcccacactggtctcaaactcctggcctcaagcaatcctcctgcctcagcctccccactagctggaattacaggcaggagtcaccacacctggttttcaaagcaatggttttcaccttctttgtttcagaatccttttatagtcttgccaaagaacatctaaatattattattaaaatagttacatattaaaatagttttggccaggctgagtggctcacactagtaatcccagcattttgggaggccgaggcaggaggattgcttgagcccaggagttcaagaccagcctgggcaacatgcgaaactccatctctataaaaaaatgcaaaaacttagctgggcatggaggtatgcgctggtaatctcagctacccaggaggctgaggtgggagaatcacttgagcctggaaggttgaggctgcagtgagccatgatggcaccaccgcactccagcttgggtgatggagtaagatcctgtctcaaaacataaataaataaagtgaaatcgtttcgacttcatatacctactgaaaggttttctgaatctcctagggtccctggaccatgctttgggaagcactgatttatagccaataaaaaaaaaagaaaagaattttttttctcctttccctggggcaggagcacacattgcatttagttgtcatgtctctttagtcttctgcagcttggaacagttcctctcgtctatggtcatactaccctgaaagtgcttgatcttagaagctaagcagggtcggccccggttagtacttggatgggaacagttcctctctttttctttcatgattttggcttgtttgaagcatataggccagttaattttgaagactgtctctcaatttggtatgtctaaaatttcttcaggattagattcaagttatccttttcggggcaggaatacaacagaggtaatactgtgtccttctcagtgtatcgcatcaggaggtacagatgttaatttatcccatcactggtgattaacttggattacaagattgtgtctgccaagtttctctgctgtaaaattacaatgtttccccttttgttaaatgtcttgtggggatacttcacatacttgagagtatgcaaatatattgttttccatcaaattttcacctgctaatttaagcttccctcaatgatccttttgcaagacttacaaaaatttttttaattaatctttttttctgagacatggtctcactattgcccaggctggagtacagtgacaccatcttagctcaccgcagccctagacaacttgggctcaagcaatcctcccatcttagtctcccaagtagctgggactacaggtgtgtgctactgtgtctggctatttatttatttattttgagagggaatttcactcttgttacccaggctagagtgcaatggcgcagtcttggctcactgcaacctccacctcctgggctcaagcgattcttctgcctcagcctcccaagtagctgggattacaggcatgcaccgccatgccctgctaatttttgtatttttagtagaaacggaatttcaccatgttggccaggctggttttgaactcctgacttcggatgatccgcctgccttggcctcccaaagtgctgggattataggcatgagccaccgcacctggctttatttatgtatttttaaaaactttttgtacagatgggttttcgccatgttgcccaggctggcctctaactcctgagctcaagtgatctgcctgccttggcttcccaaattgttgggattactggtgttagccaccacatccagcccctgcaagacttttaaagcactcctccctccctgttatttccatgtttctctaaaaaggattatcacaaaaaccattagaattaaaagagattaagttagacaagacactaggctgtgaggaaacaagctgtttcatcctttgctcttcggggtacaaagtgccataagtctttgtaggtgctttgtagggaaacatggaaacaccaaaattacaaatgcatgtaccctgtgaatcagacattccacttcaggaaattcatcctacagctacacctgcatgggtttcagcaaggttagctgccatgacctgattcataataacaaaaagttggacaccacttccatctgtaggagactggttaaataaaccaaggcacatccccacaatggaaaactgtgccattgtgtaaaagaatgaggatgctctatatggatgtactgatatggaagggtccttaggataattatgtggggaaaaagcaagctgcagaaagtgtttatagtatgctgtgctttttgtaacacaaagtgaggatgatggggtgaggggtggctagagacaagggtaggagtagacttatcaatatgtaccatcttatttagttttctaatgttgaacatgtcaatgtatcacctattcaatatgtcttgactttatgacacaagggtgtcagtgttgtattcacacagaggcttggggagagaagaggagcagggcaggatgagggcagtggcagcaccaaagaggaacctgaggcaggctgagtgcctggctggtgacaggggagaaaaggagaacgggtctgcaggtggaaagaggtgtttaggtgtgccctgcctgtgaaagtagtttctaatggctgtataatattcagtagtctagaacttaaccattactttagtgttagacattagcctaggtcagactctttaaaagtttgaatatgatttatgatcatataggtgccatcttaataggtgctatttaaaaacactatatatcagggtctatactaaatgcttcccaggcattagcttatataattctctcatcagctctaccagaaagatactaattatgcccagtttacagatgagaacactactatttacaagagttatttgccccaaattgcaaagctagcagagctgagattcaaacctccctctgcttctctcaaagcccttgtgtcccagcacgatagatatgaaagaaatgcccaggacttcccatgttacaacccacagtgtccaactgcttttcatctggttctcctctggatagtctctgtcaaacttgttcacaattccctccaaatccagtgcccagaaatgaacccagggactaccacattttcctttgcctctatctctctctctcccccacccctctctctctatatataatatctatatataatatagatataatatatatacagcctccacagctgggactacagtatgctccaccacacatggctaatttgttttttgtagaatcgaaatcactatgttgcccaggctgctctcgaactcctggtctcaagcgatcttcctgccttagcctcctaaagtgctgggattaaaagcatgagccaccacagtcggcctgtctatccatattttatttgatgcacatcccaaatgagcatactcacaactcagcctgggcattcagcacactagctctttctttttccacaggtcggtctataagccacatgatgaagatgagactgatcctaagccctggaagttatcagcccaggtattccctgcctctcacctcttggacccagcacatttgggaaactgagatcccatgccctggaatgaaagaaacggatctataatcatgtttccggaccgagaagccatgtgcctcattctgtcctatccaacattgccatcagtggtttggaggaagacacagtcaggaaacagtcaagggatagtgggtgcagtgatcatctgctggatcccgggctgcctcgccctctccactatgcttctcctgcaggtctcccaagagttctcattggtctctgggagactttaccaccagcctagtctctggtactcactgcacacagctccccttggcttttattatactatcaaggtttggatgatcccagatccatttcctcttggttcatcttagactgtttagactgggaaagaaaaaaagagcttgtatgctgggcaaactaatttgtgactgtgtgtgtgtttacacacacataggtattctgaaaagtattttttgtgtatatttaaatataataaagatattttaggttgggcatggtggctcatgcttgtaatgatttgggaggctgaggctagaagatggcttgaggccaggagttaagaatagcctgggcagcatagcgagatcccatctttacaaaccatgaaaaaattagccgggtgtggtggcgtgcacctgtagccatagccacttctttttttttttttttttttttttttttgagatgcagtctcgctgttgctcaggctggagtgcagtggggccatctcggctcactgcaggctccgcccccccaggttcacgccattctcctgcctcagcctcccgagtagctgggactacaggcgcccgccacctcgcccggctaattttttgttttttcagtagagacggggtttcaccgtgttcgccaggatggcctcgatctcctgaccttgtgatccgcccgccttggcctcccaaagtgctgggattacaggcgtgagccaccatgcctggccagccatagctacttcttaagtccaggattttgagtctgcagtgagctatgatcacactactgcacgccagccttggcaatagagcaaggccctgtctctaaaaaagaaagaaaaataatttttctttaaattaacgttttcatggaaatttctaatatttctagaactggaaatattagaaagagatagacatcttaagaacttttatcacaaaaaaatcagtttttgaaaaggactccctacttctgtgtggcactgtttttctcaattctgagtgaaaagattggaaggcttgtgctttgctgtgttaggagtaggttcaaggaaccatgaagaggagagaacatagcagttgattaccctctctttttttagtacttccttcaagatcagtgataaaattcctctttccctagccctgcttccagttcagtagtaacttccatgagcaggtaattcagcaggtccatgtccattgcctcataccctgggctgttctgttctttcctttggactcaagaataagaccttggcagggaagagataggacccagcttctgctgtggttactgaataactcaaagcttaacccttccatggaaatttggcaaaacatttagcacaaaaagcagtctccaactcccttgggttcccagtttactaggtgaacatgacattttaattaaggtgaaattaaacttaccaaaataaatcctacattatcatttagcagcatttagctgaggctctcaaggcatctcactggaatttgcccaaatcctcctgttagaaagttcagttttggcttcagggaaaccaaatcaaaacagcaaatatttattgaacatgtcctgttgaatgtaccaagtacttgataaacattcatgtttgaaaaaatccaggtccagagtagttctgctaacttaataacaggaaatatagcactttaaattcctcccaaatagaaagtttagattatcaagtaaggtgaaaaatgcttactcatccagaagaattgacaccttgtatgaacagaaacattggacaaggctattctttggaggctgagcaagagagagttgtgtggggtcaaagcttgttgcttttatattagtttgggaagttgtaggtggtgaaagagaaacagcaaagggaggctgggtgcggtggctcacgcctgtaatcccagcgctttgggtggccgaggcagtcggatcacttgagctcaggagttcgagaccagcctggccaacatggccaaacaccgtcactgtgaacaaaaaagtagccaggcgggtggcgcatgcctgtagtcccagctacttcaggaggctgaggtaggaggattacttgagcctgggaggttgaggctgcaggaaattaagtatgggttaaggagatgcatcactggtgccaggctgacaataggtagacttgtggacttaatttaggtatcaccttgactggataaagggatacctagaaacctgataaagcattattttggatgtgtctgggagggtgtttcccaaggacatttgtgtgtgagtctgagtggactaggtggagaaatctctgagagccgtgacagacttttcttctgctgccttggacattagaacttcaagctcagtggggcacggtggctcacacctgtaatcccagcactttgggaggccgaggggggcggatcacagtatcaagagatttagactatcctggccaacatgctgaaaccccatctctgctaaaaaaaaaaaaaaatacaaaaattagctgggcgtggtggtgtgcgcctctcgtcccagctactcagaaggctgaagcaggagaattgcttgaccccaggagtccgaggttgcagtgagccgagatcgcaccactgcagtccagcctggtgacagaccgagattccgtctcaaaaaaaaaaaaaaaaaaaaaaaaaagaacttcaagctcacaggcctttggactccaggacttaaaccagagactcgccaggtcttgaggctgtcacttccctggttctcaatgtaaaaatgtttaaacttcttcaataaatgaaggggtttttttgtatgtctgtatttatgaaaggtaaaatttctcaagatctcaggttttgggacgactgtatatgcagtggtgacccattgtgtgtgtgtgtgtgtttgaagcagggtctcactctgtcatccagactggagtgcagtggcaaaatcatggctcactgtagcctcaacctcctgggcttaagcaatcctcctgtgtcagcctccccagtagctgggactataggcacaaatcatcatgaccagctaatttttctattttttgtagagacgaggtctccttatgttgccacactggtctctaactcctaggctcaagtgatccagctgcctcagcttctcaaagtgctggaattact

SEQ ID NO: 401 - DNA, 46014 bp, Homo sapiens
tttttctataggtcgataacatacatgaaggttagctttgcaagcacactcccaaaagatatttaattaatgcacagttaaactatagtgctgggaggttcacagaaccaaaaaaaaataaattgtaaaaggttgacattggggagtaaagtgctcaatttcaaattggaggaaggggtagaagcatcttttcttccacccatggcagagaaggaagctgcgtttggtgctgagaacaatacctgtattctgtgtcctggaggcgagaataatcatttccaagtaactgcacttttttcccataaggggtaggaagagtaggcctgtgtgaggactgaggggaagggcatggcaggcagaggggaagccctgtgttttggaggtgagaacaacattgttctcacctccaagtaacaacacttccatttcacatctagatgtgcatgaaagctaagaaaatgggagtcttgatatgtttcaaatatcctatgagaccactgcctggtttccttgagtctaattctaacttcatttgaaatattgtcctgtaggtgaaaggccattttctgaacatgtccaagtttccttaagcaaacattatgcagaagccatgggagaagcaaaaggaggaagattgctgtcttttaggacaatggtgttttacagttacacttgacttttccattggccatcgtggcatagagctgagcgtcacccacttcaacccaggagggcagcagtggagaaacagtgaggagggaacctgatttcctatgctagaggaacttgcatctctccttcctaccccttatgaatgggggagtgataggcatgaagtcacagttccctgatgaacttggatctgcttcactccagttcttcttttagaaaggactgtctatggataaataaaatgtggcacatatacaccatggaatactatgcagccataaaaaagaataagttcatgtcctttgcagggacatgaatgaagctggaaacattcattttcagcaaactaacacaggaacagaaaaccaaacactgcatgttctcactcataaatgggagttgaacaataagaacatatgggcacagggaggggaacatcacacactggggcctggccaggggtggggggctaggggagggatagcattaggaaaaatacctaatgaagatgacgggttggtgggtgcaacaaaccaccatggcacatgtatacctgtgtaacaaacctgcatgttctgcgcatgtatcccagaacttgagtataattaaaaaaaaaaaaaaaggtcagtttagggagtgtatactcagggcagcttgaatctatgctcccaggtaaacatttaaaaaagaaaagaaaggaaggaagagaaaataaaagggcagtcttgaccctgcacttataagtcttatcttttccctgttaaaaaaaaaataaactaggcctggtgcagttgttcacgcctataatcccgccactttgggaggctgaggtgggagcatcagttgagcccaggaatttgagaccaacctggggaaaacagtgagacctcatctccacaaaaaataaaaaaaattggctgggtgtggtggcatgttcctgtggtcccagctactctagaggctgagctgggaggatcacttgagcccaggaggttgaggctgcagtgatccatgatcacactactatactccagcctgggaaatagagaccctgtctcaaaaacaacaaaacaacagcaaaaacaaaccccctttgtcccaatcaaaggagttctctcattctaccctaatgaaatgtatcctgtttctgtgcatttgcacatgcttcccctctgcccacgcctttcctctcacttcctcacacaggctaattcttccttgtccaaatgtccccatctttcagaagtcatatcaactctcaggaggaataagtcctgtgtgctctcctagcatcctaagcaaatttcaggctgtccccacatgacagaataaactgcttgactgtcttgactctccagtgacaagcacactgtgaggtccatcaatatgcagtgaattagcaaacaaatgttccttcctgcctggtattatctcaggcaccatcaatatttctgtacaggatttacctcttgcacaaagggtatctcttctctaaattcccattgtatctcgtttgtgatattcattgtgaaacacaatcatttagcaccttgcattgttgttcactcatttctgtgtattttgctcccaaaccagaatgtttgctgctaaaatgtccagactacatctcagatgtcatgttctttgttacccccgcagtttctaatataatactatacacacagtaggccatcgatgaatgattgatggatgagtgcatgaatccaaaaaaatgcttctttaaatagtgacctccatgaagatttacatgatcttggagagatttttaccataaaaaataaaccagcctttacatgacagcacccatttggtgccataagctatgcttgcactttctgtgggtatacattttcctcctgaagcggcagttatacctagtggatctgagcctggtctctggagctagactgcctgggtttgaaggtggccttccttcttgctagccttagtctataaaagacttggctgcttcatttgtaaaatgaagatgatactaataggacctacctcattacgttgtaagaaaggtaatataaagcagaaaacaggggaggagggaaggtaatccacattaaatacttggcgtggtgtctggcttccagtaagtgtctgataaatgcagttatcagtgtggcttctaagatgatgacagtaggtttaaatggaacaagaactcttagagaagccagggctcaatcatactggtcttttcattattgcacttatttatgtgggcagtgtccttggtggtatcactgtaaggaaagttatagcaacgacttttagaactaagaagttaaattccacagtgggacgtgtcatgctatgtaactggacaggaggcccatcaggtatgcaggatgcatttcagtaatgtcttagtaaaatgagtgtgccttctgctgggatgattgggtgcaatgacatgtgcatgatacatatgaaagactgaatgttatcatttattcatcaaaaaacatgctgttagctagccagaatacagatactgcaaacagctggtttgcctaaaggatttgctccttcagatcataaaacctcctcattactaagtacagagatgagtataaattaagttgtaagttagtttatgcaaattattttacattttcctgcctcccagctcctcccaaaagtaaaataaatgcaaaacagtcttttttcatttcttccctttgttttgatccctacgaactaaacacaatatttctagaaagatgtagaaaggtacagcaccccagaaataagaaaagttggtatattttatggggtataaaaggttttttattctgtgtgtttgttcacctacctgtcatcctgcttatctgaaagtgcctgtctgcattacaccaggcaacagctaagcagccatttaatcctgcatgactccctcctctgtatcttgaccacatcacagggaggaacctacaccaaggcagtccaggcttaggtttcccagcaacctgtgacctggctggaaaatgtgaactgtgccaatccgattccctttgcctggaatccagactagaagcaaggtaagctttgccagttagccatgggaactgcagctgcaggatcatgagaaaggcaggaccacaagaacctctgccaattgacctgcatggaaaacaaagttgggcactgggagagctgaagaagcagagaaagtcagggttggttagaaggaagaagcagcatttagagttcagttgagtcatttcagtgggtaaatgctagaagagccagaaccaagctctctggaccctggcccagcaccatcccaggacagtcctcgtgaggacagcatttacagtaccttgtcctagagatcagggatggatggccccctggccttattgcttcataggtatccatttcacttgtgttagattttgagggaggggggttatctctgttttttgcaagtacaagagatttttctaaaacacttacttggcatcagtgttagaggggcgttggctcaaaaaagccatgaaggcgtagctttgtgataacagtagttggcaagatgataatgtccagatcatacacaaatattagctccactgaactctgatctcctcagaaccagagtacctgctttaaagggacatgagccaatgagaaatcatgcagatgaaggcagcaagtataatgagagggttggaaagtttctcacacaagtactgaagaaatacgagattttttactcgaaaaagtgaaaattagggagacaaaggatgtttctaatatatgtagagctgccacgtggaagatacaccagggttgcattttgttcctctaaaggcaagaactaggattggacagaagttataaggagctaggatttagcccagagtttccccacaatggaatgagagctgcaagatagggagtatacagcctctggaggtgttcaacaagaggccaattgaccagctaccttgtcccaggagaggggagtttgtactagagaatatctgatattatcttcagtgttaatacacaatgagtttatctacaatgactatgtatattacctctaggctctaaacaaacgctgctgaaagaagctgaagatcaagcagaccgtaaaatagatattcctccttatctctagaagactccaagtggtccagcaagagaggagtcatgaaatacctcagatcctctctcatctacatttgtctctggggctgttgagacaatgcctctgtcaggggaatgatgtcgtgggacctcctcttattgagattagcctctcagaagggtgtctgctcattgccttttaagcagatggaaaattctggaaaggaactttattttttgaagcttagaggaggtgccggttggtgccaattttccaaggataaaaaccaaattcaactaatttaccccccactgggggagtacaaaaaagcaggcaagctaagtctgaaagctctaacaatggtttagcaccacttatccatgggccttcaggcctaccacctaccaatcatgcaagtaagttcagattattgcaaagaccggacacctctgcggtcctgctagaacaaaccaaacaaaaatcattctctgtgtgtcttcttttctgtgcctgccttggtcacctccactatccacgtttaataatttggcaaaggacatggcaggtggagagaaatcccagtattctcactatatcagggatgctttctggacgtcctctcaggaaacaggaaacagcacagcagaaaacaacttctgggagtctgctagtcaaggcctgggagccaaggtgttgagcgggtaacctaccactcccactgatgacacgaatggtccgcttaccaacatccctagcaaaaaaaaaaaaaagtcctttttttgttatttccatactatgtcctcacacaaggattcgattccagatccagtaaaataggaaagtgccagaacagaatgccttcagatgaaagaagtgaacggatagggtttaaactgcagcagtgctaaattattgttagaaaccagaaccattttggagaatgatttggttttctgtcaaacaggccaggtccattgtgcagcacagaatgaagccccggagcaatccggcatccttctgtgatggtaaggcactcagcccagccccatgttaggtgcaacccaggtatctatgcatgtcctggccaaggtggcaagtccagcagcatttcccagagctcgtcctctcccagccctctttgtcttccattgcagagctgtgcattccactgcaaacagagcctgccattgagccatttttctctgcactgcacatagtttctgctgccaggatgagtcaccatgcaacacataccctcatcccctccacgctgtacttaaaatactctagggctggccaaacagaaccccactgtgagtgagcacgtgtgtgaaggtgggattggcagctcagccctgcggagccctctgaagagcagtctgcattgtgtttggcagagagattcagagagccaatatttggggaggggcagagaggggaaggtctgtttttcaaatctggttcgacctcatgcagcctgccaagttgcgccctctcttttgcaggcacccctcactttagcttctctgaacagaaggatcttactgctaggggttgatttgtcctgcctcttctcccagcccagcttctgactggccaccttgctacaaacaggactgctctgtcctgcttttacctgccagcctgtctgcctccagcgtagatttttcttcaatcgcaagagcatctattcatttcctgagttagaacatgtcatcctcactgggacggaggtctctcaccgctctcctgccattcctgctctccgcttcccctcatccacccacagagcactaaccttgggcagaaccaatcacaggactccagaaccatgcctcttccccagcctgcactgaaaaaagggattaaaaattgttctcttcctcctgagcctttaaactgaactgaataatttctttctcctttctgcagagaaacactgggtttccatacgcattgactgaaaagttgtcttagttccccatggtccacaccctcttccacgcccagccacacactccacctgccggggcacccctccctttggagaaccacacatgttcggctttcaacctgctgctacagcacccttcacagaaggggccttggaacaaaagcccagctcagcacagcccaacgggacataaagtacttgagttattcattacttgagttggaggaggtcacacagcaggaagcgcactggaaagcaaggggaaaggtggcagagagggtggggaatgcgtcagggtgaccttctaggggctgatgggaactcagagtcctggtatggggtgggtatcagagtgggaaggtgacaaagtcatagcaacagccccaaggttagccaaggtcaaatggaaacagctgattataattaagctagctacttagctcttgccatgcctcaggcactgtgcttaacactttcccatatcgctccttttatccttgcaataatgtatcacttcaattttatgactgagggaacagccctggagagaacaagtgacttgcccaaggtcacccagctagcatgcatgttctgaagctgggaaggtgaatgtaggtctttaccagcttgttctgtgtgatgaagtggttagatgagtggtacaattccagatggtctagagtggcggggcaagtggagtctgagatgagctactgagataaatctggttcctatagggctgagatcatgttttccagcagcaatcccaggactgggtggaaacctggaggttttcaggaaggctggaggaggctggcttaggatgagctgctgcattggctgtgcagacgtgaccctcaggacttcatctgaacctgtgaagagtttccatgcagggaaggggggatgagtagagctagggacctaaaatttgagaggggaagatattccccagtggaagacagtaaatcaaagactagagaccaagcatcagtctactgggtgtttgctacacctctgaagagctaaggtaggacacttgttttaggaaaaaagaaaatctgtcactggagactctctttatatattttgtcttaccatatgcttcttttggaaggggggttgggaatcaaggtacaggaacggagtgggcacaagtaagggcaccaccaactcccagaaccgcctcatcccttcccatgctaccctttccccactcatctctttttgctgattctgcctacaggttttccctcctgttacagtaatggacactcaacaacacatacccttcccagcaacctgtcctgctggaaaactactcgataaggtaacttctgcctgaaggggaccagggtcatcatacccgcaagtgcagcatcttcctgcagctctcatactaccaagctggggtttttccaacataaacattacaggtgctaaacgagaggtggcttcctttctcaataagctgttctctctctcggatgcccttgacagagccctgcagcctcccccactggggcttggtggataggtggtcgcttctcccccgaatttcaggaatgtttaggtttgcacaggtcctgcaggcgagcttggagaaggattagaaaaatgctcattcttaatcagttcgggcttgtctttatgccagcgaggttgaccttggggacagaagggtggccaggataaggacaagcatcctggtattggggaattctctgatatggggctgggacgtcaagatgggccatgatggcccctggggatagggcttctctgcagtggaagcagaagcatcccggtgttttctgctgtgtcactgtcctcagagggatgtataaagctgcttgggggctcataggagagggatgaaaccaagagtttggctttccagcaacagcggacaaagagtgggaaggggtactctatgccccaggtctgcaacatcttgccctatgcgctaggttttcccaaaggtcctttggctccaagaattttacagcagaacaaagggatcgatacccccaagggggcataaaagcatgccaatgagaatacccgccgccgaccgggcaccaagaaagtcctcggtggctgggtcacgtgcagatattgttgcctggggtctagactggcctgagtctcaattggtttctacgggacaactcactgcgggctaccgccctgggtgggtttggcaattgtcctgctcgaggtggttcaggccgcccacaaggggcacagccgggcagtcaggaaccggggctgccggctgggctggcctgcaaagaagagggaagggccggaactgcaaccgcagtggcggggagtgcgagggggcggcaggtgcaggagcgggaggcggggcggagctgggcagagtcctcgccagtccggcgtcccggagtgaccttcccccaccccgccagcgcccaggaggggtggacccacagcccagggaggccgaaagcgcgggcgggcaggcagaggcgtggaggctgggccaggactgccgggctggggtcctcgaggctccgggcgacccaggtgcggatcccccagccacggaaggggcggttcacgcccagccgggagctgggagggggctgcgcggcgctgcctgcgcgtccctcaccgccgcccccgcctcctcctcgccccgcgcccaacgccccgcgcccagcgatccaagcggcccctctagccccggcggctcctttgtgccggccccgaacccgccctctcgggccgagtccctgcccctggcgccggcgattggccaccgggccgctagagggcggggcgcacggccgccggggcgcggtatatagtaaaggtagggcgggcgcagccaattcctcggctcctggcgggagtgccggtggcgccccgcagtccgcttgtccgtccttccctctctgactctcctaccccgggcctgtctctgcagaggtcaggggaggcgggggcccagcacacgtccccagtggcagcgggagcggcagctacgggttcgcggagcccccgaccccccaagggctagaggagcgctcggcggaccaaagaaagcccgcgagcggctgcgcgcccaccaataggtgcggggctcggagccgcgcagcctgcgccgtccctccctccgcccccgccccgccgccgccgccgccgccgcctccccctcctcctgctcctgccttggctcctccgccgcgcgtctcgcactccgagagccgcagcggcagcggcgcgtcctgcctgcagagagccaggccggagaagccgagcggcgcagaggacgccagggcgcgcgccgcagccacccaccctccggaccgcggcagctgctgacccgccatcgccatggcccgcgggaaagccaaggaggagggcagctggaagaaattcatctggaactcagagaagaaggagtttctgggcaggaccggtggcagttggtgtaagtacggggtccgcagctcccggccgccgcgtctgatctttcccgggcggcgcatcccctgcgcagggtccgcggccggttccgcacccaccgcgctggccggggtggcgggggcgagggtggtggacgctgctgggtcgcgccggcctgggcttgcagtcctgtgcggaatgcggtgtccccagagtggggcgcagggtcggggctggaacacgacaggcggaaggttatgcatatcgtagcgatcttggcttggtaatttgcagtctttcctaccgtgcatcggttgagccttttactcctgggaatagtcaggctctgcgagactacatttgtctctcccgtgtcctgagtccttaaaaaaaaaatgagatctggggtcttgagagaacctcgtgaggtgatgggatctaatgcagacgaggttgtgtgttacagcatctttcttctagtctaaatacgtatctcaaaagagaggaaagagaagggtggagaggaatccatccacactgtagtatttcacagcgatggctaaggatttccctccatgacctcccctggagtcatcaccacccagaaatggttcaataagctccatttcaggactccgattcttagctttggcccgaaacctggcaaagtctggttgttttcaaggtctacacagacagttgtggatcagtcagtaggttgggttgattatggtgaagggaatataaacgcagagcagctgatcttaaaatattttgtgcagcctgttgcttggttggatagacttttttccatcgaaaattagatttcttgttttcagcctctccggaaaggtgacttttttttttttaaaaaaaaggtcattttgaagggcagagttgtaggcgaatctatgagtcgtgactgcgtgagggaaggagggagggaactccccctgctgcatcactgccccctcctcctccaacatcatcatcatcatcatcatcatcatgaccatcaccaccaacaccactggcaccaccactgcagtcattcagggagtcctgaacagaggccgattggtgttcctgcttgggaggatctgtgggaatcggcaggagaatgagtcagggaaatagtgcttagctgacattttgaaatggaagaagctggaatatatgaatttttgtaaagaaaaaaaaatgcagcctgtgagtctctcttgattgaaaattaaagggttaataatgcatcacacttcaaggttagtcaaggtgaagcgtctttccaaggtgttactgggaagcataggtatccctgagccatggaaaatgtagttctttaatggcttttagcttttgttttatattttattttggggagacttcttcattgagattattgtcatagtgtctcaggcataaaggtagtttcctgtgttttactgtggaaaggaaaacctgaagaactgtggggtgtgtgtagaatgaacagctccctggcaactccttgtaacttgagggaggcctggaaggtgcactgcggtatgggcacccttctccccaggttagctggggcttccttctctggtggtctgaccctgctgcgtcacaggggcaggggctgcattgactctaggcacattgtgaaatttgccttcttgtctttttccccttagtataatatgcatctttgctcattccagtttcatgcttctcagaataatacttgctttagagggtaaggcagtatggactgactcatttttaagccgacatttaatgggcagcacctccatgagagagagaaagagagaccgtgtgtgtcaatttttatgtcttgatatcctatccagcaagctatcagtatgctgatttgtgaatgtagacccaggactgctgtacttgcctcctcttcccttccatgttccacggtacaggtgctgggctaaaaatcccctttttgttttgtgctaatatgtctgcccctttctggcagtgtaaaaactgtcagagcctctcttaggtagaaaaggcggcagcaattaccgtctcctacggagaaaatgccccttttccagcactgggcccaacatggatgcccttggggcgagggcaggatgcccttggctcgattttgcttataggtagattttcaccaagatggacgcaggagactcgcctgtcacctgctggagaaatcacagcatgcaaatcactttgtgccttctgcctttttattaggttaatacagacattggtaggttttatatttacagctaggcctggatgcctgcctgtgaccttttgaagggtacacactgtttgtttgttcatttgtttgtttttccaaaaaaacctctgtattacttttttttaaaagaagaaaaattgcgtgaaagggagatgcctctgaagcctctcagctcccctcacagtgccaccccagatagttggtgtgacttatctagccttttttttggctagtggggagcccctggtggcctgtgtctgagtgagccactgcataggcccctctagtcctgagtgctccactctctcccagtgacctcacggcagtaactagggagattttatcaactaacatctcagagcaaaaagggaaaattcctcacttttcttaggatatcgtgtgggcagaatagaaaggctgtctgtttctgagcttaatcggcgtacttgcaaaatgacttgtttttccgttgctcttatttgtattttaaactgtagcctcaattatgtaccctcttatgttgttagaattaggcatctggagtccagggaatgagtatagagatgtttcagttgttcgaaggggcacatgtaggtaaggtaagagcaccaagatgaggtgggggtggggggcagcaagaggaaacttgaatcagggctacgatagctgccttgctgactgttacaccaactcttgcacctcttaggagcattcactggaaaaattttccagatctcttgacgtcacagcgttgccatttgcctactgctgcttggatacagaatgcagcacttaacccttgtcctgcggggagggagtgattgagttgggtgctgtagttctggattacacaaccttttctttcttccttatctttacttctgtctttgcttttttccttgttatttgcttttgatagaggagaaaaaggattatgattaagcattttgctgtggttttgtgtgttttgcttgttttaacagctctgtagcctgatttcctttaactgtttagtgcctgataggaaagttgggcttttaaatgtatggacagggcaacaaggctaattcctgcagttgtgtacccactccctccctggccccctcctaccacatatacttcttttcaataatactgtttttcagtggcttttctccaagtaccctggcatttttaatgcatgagatctggacctttttagcagtaacctaaggctcctttgtgcagtcgtgcttctgactcgataaccttacagttcacttgttccctgttttgcattcacattgagtcgtttggctggcacaggactgccaggcaatgcctagtacagcctgttactatgcagctaatcagggagataatccttgtaaaccagtaactgatagccaccctcattcccatctatgtgttgagtctttttttttttttttttttgcttttgcagctatttcagcctccatcctgttgtcttgttaactatgggaaaaagaaaatgcagcccagcaagtcagtcattattcttgttccagttccagaagatggaattaaaatgtgctggtcattttcactatagaattttctttttttccccttgtcttgtcctccgaggggaaagagtgtgctttgttgataatacaaaccaaagggagagtgatagtaaaaaaaacaggaggatatcatcactgggtttctcaggattcattgctctgccatagcaaaataaccctcaggcatctgagcatttggagaaacagcagagcttggattgtagtatttaaatgtcaagggatatgcaagcaaagaaaacataggtctctaagggagtatactgtcatattttaaattcattgcataagcatccaaacatagctctagattttattggtgatcttcatgattttttttataattttgagaataaaaaatatggatactttttttaaaatttagggaataaaaaaatataaggatcctagttctagctgaacattcctcctacccttaaccacctcccatacacactgcaagtggagggctgcccagcttctcgattttcaccctgtgtcagtggggtgaggtgcactcttgacgttggacaaggaagaaatcatgggaccgggggaaccaggaaggaagcttgttcatccgtgggaagattaaactttcattctgagcatatgactgcatcacagctttttgtttctgttcttcttgcagttaagatccttctattctacgtaatattttatggctgcctggctggcatcttcatcggaaccatccaagtgatgctgctcaccatcagtgaatttaagcccacatatcaggaccgagtggccccgccaggtaaaatccacatgaatagcttcatttccttcagagatagcatgggtgtcactttttctattgagaaaaaattctttggaaaattactctataatgtagtcttaaagcaaccatgaaaagggaaaagagaaacttctctcggctgcagccagatgtcctacccgcattgcaggcagagctcccacgggttgcagacatcttatttgcccagttctagagtgagggtgaagcgtcctggttcttggccagcctgctacccaccagctatgtgactgtgaacagattgagttctgatgggggcctctgtcttctcatttttcatattctagggtttggttagtgggatcctttccagaccttttcaactctaacagacatttttttacttcttgaggggggctatgactcaggtaaattcttttaaaaaagtcacttgggctcctgttttaaaaggtgaacttatttttagagatgataagaagctgtggaatgggcagctactcacagggagaggagccatgactttaggggtctattgtcccacctgctgttaatttgcagtttgagcttgaacaaagtcactcttacttctcaatatttatacccattgatttaataagcatctcatttgccagctttctggtcccactttgtagtttaattaactgtctcttttagctcttaaaaacttgggtgaacaaaaagattatcataagaaatgcaaactgccacacgagtccctgctgtgacttgggtgccatcagtgtagagctatgtgtgtccacaccagtcgtgaaaggcccatggccatcatgcctgatgctgataggacaaggcagtggaatagccacaaacgtgaatttaccatctggctgttgtaaaaatcattgtctggaggacctagagagaaagtgttgcataacttccgggctctcacttacgaatgaccttgaagctgctgctgagggatggcaatgacttgtcccttctctgctttcccttggcaaaggtttagtaacagctgtatttaggtgacaatcttcagatgatctacgtggccctgagcagcctagatcaagggctactgcctgccacaggcttttcctgcgtacctccttgaatgtgggaaggattcacagaggaagatcttcaaaatacggaggtggcaagcattgttgtgtagccctaagtcaaatagttctccactgtaagaaaaactcaaaatatttccagataaatttagagctgagggattggggaagtggaaaaaaaaaatcacgtaagtaaataacataacttaaacctgcttaataatccagtttccagcaactgttttccacaagaggtgggtctgtggaaaggttgaagcaagaattctggagtatgcagagaagctgaaacatgttttacgttgggtatggtgatagggaagcattgtgtcttttcatgtcctcttctgctagaactttgtggtaccattagttgtaattttaattggtgcggatattttgtttttgttctttgttatgccatttaaaagttattcttccatcatgatgtgattttataattcttttttttttttgagacagagttttgctctgtcacctaggctggagtgcagtggcgcaatctcagctcactgcagtctccgcctctcaggttcaagcgattctcctgtctcagcctcccaaatagctgggattataggcatgcaccaccatgcctggctaatttttgtatttttagtagagacaaggtttcaccatgttggccaggctggtctcgaactcctggcctcaggtgatccacccacttcggcctcccaaagtgctgggaggtgtgagcatgagctaccatgcctggcctgctgctgttttataattcttatactcaaagccaaatacgactacaaagtcaaatattttcttcaggaaatttcctagattaaaaaaaaaaatggtccttgactatataaactttgaggagtcagcctttaatgaaactaaaaattctctttgtgccctttgcagaaaggaaaatttaactttggaaaagaaatagccaaagggcccaaccttgtaagtaaggacttggaaatgaccttgcctgtaaatcaactggctgaagtgctcagtcctttccaacaccctctcacggtgcctcccttcccttccttccatccccttcctaaaagacatgttcttagtacctatatttagtgtgctcacagcagttggactgacctgacaaaccctgacttctccaaaggaatgctggtggctcatcttggaaaaatgcattcctgtcctgtggtctgagtcacaggaaaagtcctcagtcctccatcttccttgttctttggcctggtaatttctgtctcttcttttcctcatcccttcccccatcacctttcaggagagtctaggccaggcccctcctcttcacctgccttaccctgtggggtttttcgggggcctttaccaagggacatgacattcatatgaaaatgacagtaaccttgatcaggccaggccagcagagtgccgaaccttgatcaggccaggccagcagagtgccggctgccacaaagtgcagctcttgggccaccccttatggccctgtgttgcctgaggaccctccttggcatttttcaatgccaaggaccctccttggcatttttcagagtacgtgttagaagtttgtattttgcataggaaataactccttaagtatgcagacaaacagtgtgtttaagaataccctgacaattttttggcttcacattagtatctttaaagcctccattttcatgtttagttaaagagggaaaattgtaaatttgagttagatacacctagtgggtgtgaaagtttgcatatgatttaaagatataaagacttactaataatattatcagctgaatttgaggcatgaatgcaaatccagcctgactgggtattgactgccctttgtacaccggaataccttgtagttggatctcttctcaataacgtgtgaatgtggccatatcaagcagtggcaattgtgcagtgagtgtatttgggcctgtatggcgataatattggataaactgagaggccaaacatgaaatctgagaggagagactaaactacagaatggaagtgaaatgtaagaaaaaatggtgaatgtgtacagcttcttggccctgaacaatggtggccgtttaatgcacatgatattccttacaaagtcgtgttgcagccggtgtggtagctcatgcctgtaatcccagcactttgagagactgaggcaggaggatcctttgaaggcaggggttcaagaccagcctgggcaacatagcaagaccccatatccacacacacacaaaaaatttttttaagtctcctgttaaaaaaaaaggggtggggccaggagtggtgactcacgtctgtaatcccagcacttccgaggcaggcggatcatgaggtcaggagatcgagaccattctggctaacacagtgaaactccgtctctactaaaaaatacaaaaaattagcctgtcgtagtggcgggcacctgtagtcccagctactcggaaggctgaggcaggagaatggcgtgaacccgggaggcggagcttgcagtgagccgaaattgtgccattgcactccagcctgggtgacagagcgaagactccatctcaaaaaaaaaaaaaagaaaaaaaaggggggtggggaatcatatgctctgtgagaactaaatgagatgataaacatatataaagcaaatagtactttatggtggcaaaaccaatggtattaagtgtagggtaactgttgagagcaacttctgtttttttctttttttcttttttttttttttcaagagggagtcttcttctgtcgcccaggctggagtgcagtggcatgatcttggctcactgcaacctctgccccctgggttcaagcgattctcctgcctcagcctcccgagtagctggggctacaggtgcgcgccaccatgcccagctaatttttgtatttttagtagagatggggtttcaccatattggtcaggttggtgtcaaactcctgacctctggtgatccacccgcctcagcctcccaaagtgctgggattacaggcgtgagccaccgcacctggtccagggtttttatagccctatctttctactagaagcagcagtttcttctttttggacactaaatttccagatatgacagggatgctttgcacacttagattttcatggagtcaataaaaccttagctttccatggaaatgtttaagagacatttgggaaacatgtttttaaaaattttaaagtgaatttaaatggcattgtatttgttgtgcagtctctccctttaacaaacccatgcttgttgggttagcgcctgccaagcttttctccagaggagacccccttaggcagtcctgcagtgctgctctgcagcatcgcttctcatctgttgatgcagttggatctggggagagacgcagcaattagctatgctggagagggctgagcaggcacaggcacgcacacccacgtgcatgcccacggacatgcaagcgtgcacacacacgcatgctcatggatatacacacacactcaggctaccaagccctggccctgatttgaccctgcttgccttgctgcctgcccagtggtgtaatggaaaagtctcttcttcacatccgccattgcccttcccccacctcaggctcacttagcaacagtggagtgaaatgaaggtcactgtgtgtcaatcggtgggtccgggagattcccagctggcttgcttcctggtaggcaggtatgaatgtatgctgctgttctctcttttaaggttgtgggtggctgtttgtttagctctgaagtatagacggctcagtgctagcagacacattttcaaagggtcatattcttggcttgttggtaatcagaatcgggcaggagaagtggggtggatgcagaccagctgaccacactggcaccaccagcagtttcagtttcatcttgattgtaaagaggaaatatctaatcttaaaactcattaggggcctggcgcagtggctcatacctgtattcccagcactttgggaggccgaggcaggcagatcacccgaggtcaggattttgagaccagcctggccaacatggtgaaaccccatctctactaaaaatacaaaacttagctaggcgtgatggcaggcacctctaatcccagttacttgggaggctgaggcaggagaatcacttgaacccggaaggcagacgttgcagtgagccaagatcgtgccactgcactccagcctgggcaactagagcaagactccatctaaaaaaaaaaaaaccaaaaacaaaacaaacaaaaaacccattagggttcgagtcattatcattctatctcagcttgattaagtaaaattcctgagaagtcattatgtcagtctcagaatacctaatttttccaccccccgcaaactacctcatacttgtattactatctctcactcacacttcaaaggagaaataaggggaaattagaaacatttggcttccttatactttggaggggttgttagtgcaaagtgccagtaaggtgtttccagttagaatacactgctttgtaatctctcagctgacgcgatgtatctgtatacacccagctgtctctcactttccctctcctcctcccttcccaccctcaaatggatcctgtctacctggtcccagaatttgtggatgagttagcattggtggcaattagatttccaaaagctactgcacagccttatgacttggtaaagggtttgtggggggaactctgtttggcttcaacaactcaactacccaggtggtgatttctttatttctaaagacaagggtacaactagtaagtcatctcttgggtacacaggaaacctaatgatttactttaaaatgttcttggagccacagaaaaacagatcttacattgtatgcccattgtatgatgaataagcagaacagagacctgataagtaggaaggaccaggtaacaaatctgtgggagtgatggtgggggaaaaaaaaaagctggatttgtgaagcttcatttaaggattttttgctgcattcacccaagggtcatagaaagtggggtggaaagagcagtagcctgacaggtccacttctaccataaaatctgatggggttattggactggttgctcttaactgttggtcagtgctctcatgctagtaatctgatgaccagctggtctgtcggatgcagtcaagactagtgagaagctggggagatgaagggaacagggatgtatcatccagctttttcccacatacatgcatgagtagatcttatcaaatgtcatgtagaatgcagtgtcttgtttcaggatattacttaacaaatgttatgttttatatctagataagtcaaatatactatatgtacttgctcttcagtttggccttgagcataattaatgtaaaatactaggatttatctatttgtttatgttattcttttataaaagtggcacctttcctttattgtattgagaataagcacaattatgagctatacaaaataccaaggatttgcccctatggaatatgcatttttaaagataggtcaactgaactaaataactccctgcttgcctgaaagtgaatatacagccacaggaagaagaggacggatcagagaagagcctaaatcagagttcacggcatttagcttagacaggaggaatgatttctttaccctgagtgttggtaaacatccagattggctgtagagacagtccggggattcagttttctaagactttgtaaagggagcagattctgagtgtcggagggtgtgaatgtgaccctgcctgcaggcagggagatttattccttgctaatctcagagcctgagtctgggagctggaggcagaaggtgagtcaaaggtggctagtttccagaaagtgcaaaggcgccttttttctgtgcctctccccttactttgctaggtaagttgataccaactcacagatgtaaaacaaaaataaacaaacaaaatccagaaatatcttaggtcctacagagtggcacttaaaggagaaatttctatctcatatatgtgcgtatgcatacatatgtgtgtgtttatgtgtacatatacgtgtgagtatgtatgaattcatacctctgtgtattttttttaaaattggaaattacttttcaactcggaatgtataggagacacatgatttgtgcatggctacatttaaaagcatttctttgcttcctgtgcccttctcagtcatatgggtaccttcctggaggtttccatgggaaatgattcctatttagagatttgatctagtgatttatcagatgtattaaatgacaggtgcaagcagctgtgcatttgaataacttacaaggttgaaatggctacattctagtttaaatactttaaactcacatgtagattgagaaatgatgaacttgctacattataaacctaaagaaacaaaatcctttccctcaagccttttcccccttgtgctatcaacacttactaaagctaaacatggaggatcttccttatttctcaagagatggggaccaaaggcaggtaaatgtgtctttgaaaagcaagtgggaagccagaagttttttctaaatctaaatcttatgtaaagttgaaatactcattgaaaaccaaatattaaaattttacatacccagattatgatttctgcctcttcaagtggctttgttaattaatgatatatagcttaaggcaaatgatcctatcagaacaaagctgtctctagagctcagggtggttaatgtaaattcaagtttagaagactggagagggaaaaggttagatttgtttcctggaatataacttgaaattgcgtgccagcgattgggtgttctgctgtctttggccctctgggagttaccagtgcaaacagagctcatccttgtccagagtcataactaacaactttaagaagtgggcagtagaaagaggggcatgatgggagaaagcgtctggtctagtgtgaaatatgactcatgagaactccagtcagcaaggtgggatttgtgcagcccttggagaatgtcatggttggagaatttgggtgtggcctcaaaatgcagatgctcttcgatttaggatggggttatgttctagtaacccattgtaagtcgaaaatactgtgagtcaaaaatgcatttactaaccctgctaaacccactgtgaagctgaaaaatcataaggcaaacattgtaagttgggaactgtctgtaataattaccaaatccaatcccattgctttctatctcttcttaacagtctgataatcctaaagtaaatgatttaaaggatttggacatcctttcaaaggtctttcatctttctcttgtgagtatctagttgctttagagaaataacttgagaagaggaatttttctaatctttggagaagacctcatcaaaaactgtcctaattaagactatccagaacagaacagacccgggggctgatctgtggtaatttccaggagaagttctcaggccatcaggcttcggataaagaaaagagaggaggcagagatagtgggtgatggagtgagagaccttgtggaaatgtgaggaaagagagcagaagagctactaaggaggcagcggccacttgactgtggcgtggcctcctggacatttgtttatgtagtaagcatgtgtgagctgattgcatgacctaaacccagaccatctgtttttttactggaaatgacgtttggatcaaaagctctgtatcttaaatgaatggtcattaaggcttatgttagttaccaccgtctaagacccctcagactccagagggaaacatgagctcacaaaacagtaagacatgactgagctttctggggtttatctgtcattcctcggctccttctaccaaggttctctgttacttaaaatggaaaggacagggcagaggctttggcctagggtctaatccagctgggcaagtcacagggttctaagactccgtgcttagctgtcttatgtttcaccccttgctttcttggtttcactagtttctgatgcttctgtaagagcaaagtcaagattcttcaagcagcctgcatctatgtttccctcacaaagtaattataaacttgactggcttagatcatgagctatgcttactgaaaaatttgggctttcaggttgaaagggatgtgattccattacttggttttcattatttcttatttgccccgtctagagagacatgaggccaattgtgtatataactctcttctgggccagtagtaccacttcatgtaacagtaatacctattattttcacaaatgtgatcttagatattttttttctttctctttttcttttcttttctttttttttttttttgagacagagtctcgctctgttgcccaggctggagtgcagtggtgctgtctcagctcactgcaacctctgcctcttgggctcaagcgattctcgtgcctcagcctcccaagtagctgggattacaggcatgtgctactatgcctggctaattttgtgtttttagtagagatggggtttcaccatgttggccaggctggtctcgaactcctggcctcaagtgatccacccaactcatcctcccaaagttctgggattacaggcattagccaccattcccggccatattcctagatgattaacaacagaggcacttacaagaaagatttgtcatagtctatcagtaaacatgaacttagttttggtcatagcccctaggctcctggggaatgcactagccttatcattttgttagtaaagagcccagaggactgagtgagagttgctgatgttttgagtctgacacatgtcccctggtcacttttaatagtggaaaccgtggacttgacattgtgaaggaatgaaaagcgctcagcataatacctcctcctgttcttactctccttttttttgtgtgggagaatctgagaaatggcatcactattcctcatactcatatcaaagtaatggaaccttgagcagccactggaagagagaatgcaagcagccagaaagtgagaggcaaaccactggagaggctcactgaagccaggccagggagaacaaggatgtttgtgacacttgcttcgcaatccaggttttaccatgtttactctcaacatgaccttctagggtcactcctcctttcagcttgttaggtgagactctccaaatctcagtatcaggcttgtttatattttggcttttgctgcatcccgccctctgctgatggaccacagcttgcataattgttgtttatcacaccaatgtccctatggtcccctggctgtgggtcttcccctgaccttccctgaaggtcagatgagatccctccttggtttctgacatttgctctccttcacttgtctagccatccaccaccctcctgccttgtctttcccaagcctggaaacactgtttaaccttgtgtacataagtccatttctgttcctgactcccaaacatcacacagaatacttggaggaggttcctgcagacctcctgcctgagcgatgcacaggcatttgtctctctctctggctgcctatgcactggctcttcgggtggcccctcagcatgaccgtccctcaaggctccattctctcttgactccaggattctcccattctgaattttgttgagcctctggctttgggtctgctggtgtacttcccccaggtccaggcaagtcaccttgacttaagtgtcttatttacaacttaaaccaggagtgaccctccctacccgacttccccatttcactgggtaactctgtttaccattgctgtctcaagcattaactatctgtggaagcttctgctcacctttatttttgcaggtatctcttctctttacaatactgctgttttgcaccataaatgatcacaatgccaattttaacatagaaaaagattgttcagggtatatttaaattgctttagaaatactaaaaaattatggcttgtaggcatttttacaaaattttaaactgtaatctgtgtttattttaaactgaagatttttatgagcaaattctgctacttcccctttgattcatttctatcactgttgaaatttttgtcccccataattcttcaggttctacatcatccttttcaggatgattttttttttttttttttttttttaattgcgatagagtcttgctaggttgcctgggctggtcttgaactcctgggctcaagcgatccttccatcttggcctcccaaagtgctgtgattacaggcatgagccactgcacctggcctgaagatgattgttaatgtccttaagtcctttgccctgggcacccctgtgccttgctccagtgattacttgtcttcctctctatcccttccattcctctagggaactacatgtgtgaaaaagcatatctatacaaccccctgagcccacctcattatgtaaccacttttaaagcatcctcaatcactagaaagaatagcatttagtcgagccttactgatgcctgcttctcaagccctacaaatggtgctgcactctagttatcacttccacattcgttaacgtcgttgtcttcatatctgagtcactgttgccactctcagattataattccctagagaagcagttgtaagccaagggtgtttaaagatcttttcgtacttattaaacagattctcaaatctctttcttagagattacgattttgcaggtctggaggggagtctctgagactgcatgtttgacaagcccctaaatgatagtgacataggtgctttcctgacctgctgggaggtgggggtgggaagccagggtagagtcacttatcaaggatagtgatgatgtgcctccttatgggccccacacagagaggggagatctgggagtgaggagtagaatcaagttgccagatttaataaataaaaatacagggtgcccacttaagtttgaatttcagttaaactatatctctctctctatatatatatatatttatatatatctctatctatctatctatatatataggtttttttttttgagatagagtctctgtcacccagactggagtgcagtggcacgatcttggctcactgcaacctccgcctcccgggttcaagtgattctcctgcctcagcctcctgagtagctggaattacaggtgtgtgtcaccatgcctggctaatttttgtatttttagtagagacggagtttcaccatgttggccaggctggtctcaaactctggatctcaggtgatccacccatcttggcctcccaaagtgttgggattataggcgtgagccaccatgcccggcctcagataaacaataatttttaaatgtaagtgtgtcccacatagcatttgggacatacttatatttttttaaaaaaatgttctttgcttatctaaaattcaaatgtaaccaggcatcttttatttggcagtcctacaataaaatgcagttgtgatggacttttccaaccattgctcctgagtagtgctgtgtagtgtggttcacatacccatctaggaagtctcatgaaggcagcggcttttggatattaaagaatgtaacagagttttagagagtgcaaacccaaggcatacggactttgaattttatctgaccggcactgacatgctgagactttcagattggaaagcatttgtggttactgcatgtatgtcccaaattcttcccgtttagtttaaaagatccaaagaaatatcttggttaggtaggcttgagtctagagaatttggaatggttatacatttactgacaataaggattataaaagaagacctctgtgtccaaggcttacacgtaattagggagggtaaagccacctgcacacaatgctagctagcagggtattttaaaaaactgtgcacgttggggtactagaaacataatgggctttggagtacagcacacctgggttggaattctggttctaccactttctgtgcagccttggcccaggtagttaatctttcagtgcaagcagtgttgtcattcataaaatggaggtgatgcctaccatgaagtgttgctatggaaattaactgatctgtgatattaaagcatagtcactggtacttggggttacctaatctaaatgccagaggagtgatttaacaagggaggcaagaccctttctttttagccaagtggagttagcaaagtatgttttgtatgtggaaagtctacttttgaattgtcttcgtttctgccttcctactaatgtttttctctctgcctggtctaggattaacacagattcctcagatccagaagactgaaatttcctttcgtcctaatgatcccaagagctatgaggcatatgtactgaacatagttaggttcctggaaaagtacaaagattcagcccagagggatgacatgatttttgaagattgtggcggtaagtagactcattgtagatgtctgtggctagttttctttctctttaactcttatttcccacttctattttttgtttaatgatcgagagataatcctgaaataatgaaagattgaactctggccatatttagacactttttttaaaaaaagcaggaagacacaatgaaaaacagtacagcctcaagtatgactgttttctgcattggaaaggtgtcttactttaaaacactcctaggtactattttttactattcagagccaagacagcaattccggttttctttctcttacatccgttgaaaagtacagctacttatttccttatcttcccccaaaaagttctccctatagaagagtgcacagggccttctctcatcagaaagaccttttggtgtgattagctatcactgcactggcattcatgaaggaggatgtatggtcagggtatacttttattgatcctggttgggatagataatgaaatatgtgttaggcagctgatcgttttggataaggaaatgacttatgaagggtaaagagaggctcttagtttcattaagtcattgacatgaatacatgtcctcactcttactacctggactgtgaattttccagtccatgttctcattctttccacaaaaaaatactctcgctgggtgcagtggctcatgcctgtaatccttgcactttgggaggctgaggagggaggattgcttgagcctaggagttcgagaccaacctgggcaacacagtgagaccccatctctacaaaaaataagacaagttagctgggtgtggtgttgtgtgcccgtggtcccagctacttgggaggctgaagtgggaggatcacttgagcctgggaggtcgaggctgcaataagccatgatcacgccacagcactccagcctgggcaccagtgtgagaccctgtctcaaaaacgttaaaacaaacaaacaaacataaaacatctctctgagttttactaggtaatatcatcccttctgattcaattcaagcatttaccaactccagttctttataaggcaggctgtggcttggtcagagtatggggcgaattgccattttaagttattttggaaatatttagtaacttaaaagaacattttcagtgtgaatttttctcattagaatttaaatgaggttttcatcttactttgcagtaattaaaaggcctgagggataatcagggtgaatcacttcaaggagatagtctaaattcagactcttcgctatttgaagggaaaatagttcatttgtgaatttaaaaactatacataaattatggtttgcattattttcctccagcatgctatacattaactttgaattctatattcacttggtctttttctggcttttatatgaggattgaattaaaaatgccagaataaaatttctcagtccagcaaatgcttaatgcatagctttaaaaggcagaaactcaaatcaaaaaagcctgggcaacacagcaagaccccagtctctgcaaaattaaaaaaaactagccacagggtggcacacgcctgtagtcccagctactcaggatgctgaggtgggaggatctttagagcccaggaggttgaggctgcagtgggccatgatcatgctgccgcactccaacctaggccacggagtgagaccctgtctcaaaaaaacccttaagtggtggttgaaaaggaaaataccagttcctttttaaaaattctgaccaaaaaaaaaacctagttctgaaaattattgacagtccttttgtattctgattataatatccctgttactgagctaagccagtgttgacagtgtgaatgatgctactcacgcagtgtgatccgtctcctttcagtcttctaaatagctgagtaatccattatttaaaagaagggaaatattgccagagactaaatattacgtgctgatcaagtactatgaagctttggtgtggggccatataccagctattccttttggtaaaatatcttttaatatgagtgaagaggtgagagatggttttcctggagatcttgcttaattcagatcatgcattaaatgcagaatagcgtactctcagaataggtaactatgacaaggaagacagtttctttttcttagaactgctaagggaattgctggtacaatataaaagttgtgtttttatttttagatgtgcccagtgaaccgaaagaacgaggagactttaatcatgaacgaggagagcgaaaggtctgcagattcaagcttgaatggctgggaaattgctctggattaaatgatgaaacttatggctacaaagagggcaaaccgtgcattattataaagctcaaccgagttctaggcttcaaacctaaggcaagtaatattttaaatgatagaatttagatgagtcatttacactaagtacttaattgatctgagaagacaatgtaagatagttttaaagtatactcagtgctgactttgaaacgtagccagtagagtaacaccaaaaacttctgtatccaccctgcaattcttgtagttaggacattaatctcattttctaaagttaaaggaattctgagaggcaaagctgcattctgaagtgagtctgtggcccttttcttaatactcctgctcagtatccagataacagtttctataacataaactctttaaaaaagtaaaaatggaaaaatatattttttccctggtggtctagtggttagagaaaaaaaaaagttttttattttttacttcataaagaatggattaaaaaaaaaattttaacccacttgcatgtatagtccagttttggtcctctggaagccacaggaacatttcaaaaaaattgataatctgaaaaaatattttttctgaattttattgcggaagtagaagtttaacatcatctaggctgaattttgctagccatgctgttggctttttgtattactgcaacttataatggataaacattactctggatcactgaaaaatgagcaaattgccattgctcaccatttggtgagattatattctccataagaatggaaaatttatcgttgttgtctgcttttgtaaagctggtcatttcatcctctcctccagatcatgaattaatgctgtcctttccccttaagcctggcttcttctggcaggtttccccctaatcacccgtatatgagcgttggcattatgagtgttgtttctaattttgatagaaattgactgcagtatattgagttatgtgaacaaactcatttcatttctgaaatctggcacttttgttcattaattttctattgaatgctattaatttatttctacaatgcttgttacccatgaataatattttcaaaagaaaatcaacacagagataaaaagttttgttaactgaaggatgcatcaaagttcctttattgccatcagaggcaaaaatgagtaggtggggatggatggttgcctggctggctagtttgatggactgctggcagaaattaatgtacctctcaaaaggattttaagcttctttccacatagacaggatataatggaagaaaaacggtgagaaccattatgccaaaatgtatttgatattcatattgctggggaatacttcactgagatcaatcagctatttagcagcaaaagaaattgttgtggcatggccaagagaagactcatcccatactttctgagtaccttgcttttgacattactcatcgtagacactgaatgacatttggaccccacagaggcagtctagtctattgtgattgatttcttcccacatctttagagttacttggttcagtgataaattcagctactctttcttttcagtcctttttttcttttttctttggtctctacttggttatccattgccactgcctaattcatcacctccacccaaatctccaactattttggagttatttttgtcagagatcagagtatcccagcatctcactatcctcaccattggaggatagattctggcaacttcttagtgagcattttctctacatatttttaaagacaaatacattgctggcagaaacgtcccaaagagtcaaatctagacgatcattttcttgcatccaaaacagagtagtagcaaaatagtagttccttcctgatgtggaactaatattttatctgactttgattagactatgtatgtgttacatctcacatcaagactcacttgctgtgctgatctgagtaagcaagtgactgtcttccagcgaagtatgttcatcacacttctgagatagatttgagccatgggtgtagaagaggaggctctggatatttcatgacagcagtaattttcagactgtcctctgggtcccttcagtggattcaccccttcaagaccacccttcctcttagggcagtgacacctctgccttttttacatattggactttcctaagaaaattgcaaagaaacgctccttaaatggcagtctccccgactggagattaaaacaacaaaaaaggaaagcctacttgaagtcatgcttgagggaaaaggatgacattatttattcatgactcaggaggaaagcccacgctttataaaaacagaaatgtcaatcatctttctcatgtaatctaatcttagcaaataacgagcattatattttgggttgacttagttttcagtgtctttaagcaaagcttataatgggctactattaaaagttccatttagtactggtttgcatcacagcttaattgtagtcgttataaacttgggcacttattttcatttcagcaaaatcacaaacatgaccttaaattggttaggggagtcattcattctgctgtcctgatgtcttttgttattttggttgacttactgtgaccagtgtgtacttgtttggactacggagtagttttatttttcagaaacttaagaaatcatttacaatctactgatcataatgggttttatttttagcctcccaagaatgagtccttggagacttacccagtgatgaagtataacccaaatgtccttcccgttcagtgcactggcaaggtaaagacaaatttagggttactggggtggtggaagggtaggcagaggaagaggggagaatgaagaagactgtttaagtgacaggtagaattttaatagaagaaataagaaacattgctttcaagtataagtctcagtgagatgaattgtagctatactaggtaaaactttttaaaagaacagaaagatgtaatcagaataagactgatgtcagtttctccactggcataagaaactcaaatatctgaatttaatacattgggatatttgcttatcagaactgagaggtgaattagcccacagaagtactttctggcccacagcatgtattaaaaatttggggccaacattaaaaaaaaattaatgtcacataaaaattagtggtttgggcttctcttttaaaaatattgaaatatcgcctggtgcagtggctcacgcctgtaatcctagcactttgggaggccgagatgggcagataatgaggtcaagagtttgagaccagcctggccaacatggtgaaaccctgtctctactacacatacaaaaattagctgggcgtggcggcgcgtgcctgtaatcccagctgaggacctgaggcaggagaatcgcttggacctgggaggcggaggttgcagtgagctgagatcacgccattgcactccagcctggggacagagcaagactatctcaaaaaaaaaaaaaaaaaaaaaaaaaaaattgaaagactaaggtaacaattagtgcatgtttcctttggatccaaaaactaatggaccgtttagagagaaaggcagaacaaagaaagggagttcccagacagtgctagcaccaagcaaggaagtggagattgatttctcaacaagaaaatgagaggcaagtagtaaactttggagataatatcactagacagattatttactgggccaacagcaaggtgtttctgcctttcaatgttggccttgtttctaggaggcttgaagaatgcttatttggcatttgactcagcttccccatccatttgcacattgagaatagtctcttcttatgaccatttctcaaggctgcaatggaatagactgagtagatgttctttcctctctcagtagtttgcaaactactgtgtagattgagtcttgtttttgagtacacatagtgatgcatgatgtgagccattaaaatttcatttcattctggatttcagcgagatgaagataaggataaagttggaaatgtggagtattttggactgggcaactcccctggttttcctctgcagtattatccgtactatggcaaactcctgcagcccaaatacctgcagcccctgctggccgtacagttcaccaatcttaccatggacactgaaattcgcatagagtgtaaggcgtacggtgagaacattgggtacagtgagaaagaccgttttcagggacgttttgatgtaaaaattgaagttaagagctgatcacaagcacaaatctttcccactagccatttaataagttaaaaaaagatacaaaaacaaaaacctactagtcttgaacaaactgtcatacgtatgggacctacacttaatctatatgctttacactagctttctgcatttaataggttagaatgtaaattaaagtgtagcaatagcaacaaaatatttattctactgtaaatgacaaaagaaaaagaaaaattgagccttgggacgtgcccatttttactgtaaattatgattccgtaactgacttgtagtaagcagtgtttctggcccctaagtattgctgccttgtgtattttatttagtgtacagtactacaggtgcatactctggtcatttttcaagccatgttttattgtatctgttttctactttatgtgagcaaggtttgctgtccaaggtgtaaatattcaacgggaataaaactggcatggtaattttttttttttttttttttttgttttttggctctttcaaaggtaatggcccatcgatgagcatttttaacatactccatagtcttttcctgtggtgttaggtctttatttttatttttttcctgggggctggggtgggggtttgtcatgggggaactgccctttaaattttaagtgacactacagaaaaacacaaaaaggtgatgggttgtgttatgcttgtattgaatgctgtcttgacatctcttgccttgtcctccggtatgttctaaagctgtgtctgagatctggatctgcccatcactttggctagtgacagggctaattaatttgctttatacattttcttttactttccttttttcctttctggaggcatcacatgctggtgctgtgtctttatgaatgttttaaccattttcatggtggaagaattttatatttatgcagttgtacaattttatttttttctgcaagaaaaagtgtaatgtatgaaataaaccaaagtcacttgtttgaaaataaatctttattttgaactttataaaaagcaatgcagtaccccatagactggtgttaaatgttgtctacagtgcaaaatccatgttctaacatatgtaataattgccaggagtacagtgctcttgttgatcttgtattcagtcaggttaaaacaacggacaataaaagaatgaacacattcctcgtgtgtgattcactcttgtctaaatgtcccaacctgtgacttctttactttccacaccactaattatccaagatcttgaagaagtattgaacctgaaacggagaaacacataatttcttagttcagacaaattttggtcttttccacttaacagagtccaagaggttggtcaggacttcagacactggcataccccttcccaaagacactaaaagttaatcaatcaatcagaggcagagaatcgatgaagctccagtttgaagttccatttaaaaaaatcatcttgcagtgctactgctacttcactcagtttagaaaacatgaagtgttggttcctgctattgcttcactagacatatgtgttaaaaaaaaaagttgttagcacttcagtttttaaaaaatgaggttaggtttgtggttcagtaaattaaggttcataccttgctttttggttcagggattggcctaagtccttatttagctgtatttaaaaattagccttagtgtgaaagaagataaaaaagctttccaaaaaacattttccagctataattattaaagatttagtatcacttaactaacatgggaaatgcccacactaaaatcagggcattgtatttctgaaacggaaacctttcgcaaagcctgtgcaggcagaggagctcacacacatccttgacgtggcactgtgtcttcaggggtgctgccctcttacagagagacagatctggaggccatggccgttttggtgagaaatgccagaaacagcttcagtttccacctactgcttcatatttataatcacagtaatctatttctcgttttgctatttctagagcaacaaattgtgtgatgcgaaattagtaccagaggaacaatgactccacttaacaaaaaaatagcaagggaactatgaaaaatggcacaactgcttaactttaatagttgaagtctttaggagacttcagtagttgaaatgacacagaaaaatcctcaaactaacatacctacatgaaactgagtttctcaaagtaacccacatttatggaaatagaagtttgtcttgcagaaacatcagctcattttgtaaggtgtatgtgatatttaaatttgtgatgcttgtgaataagggaatggggctttaggtctgaggaaaggggagcattcattcaaactggagggtattttgcatttttaaggctgctataaggtcacgaccttggtgagacttaacctgttttcgtatgtattgtgtactttctgttctaagccattgtgtgtgtctgtaactttctccaagattctctccaaatcttgcttctcttaatttctccagattgtgccaacctatttcccactcctgatctttagtgttatatcaccactaggagactggggaatgtggtttgtgttcttagactcaacagatacctaccatatgccaagcattcttctaacagctagtgagagatctatcagtgaacaaaacagacaaaactccatcttttttcctctgctgctcatattctagtgttaaccatttgcatatttctcagactcttcaatacatttattatttctttttaatcagtttattctgaccctcagtagatgacatatttcatgggtgtagggacagtgccatctatctcccttggggtgttcttacattcaagaaatgggttttcacacaagtcctgtcaaatacttaattccttacacaatataaagggattgagtttttcaaagataggctgactacttggaatgaaaagcatttaaatactgaagagagaaaaaggattctcttttcaacccttcatattctcggaaggaaaactgaaataccgagttagtatgtcctcaaccctggttaatttcccttgcaaacaaagagggacaggccttggtgtcagaagctttgccataagatgttacctagctaggatttttaaactggttttcattgtattttattaccttcaattaagaatagtttaaaacaagtagttttccatttatagcagtaaaataaatttgttcaagtatagcactgaatggatttaaagaaaaatagtaaaatttcaggtggtaaatatgataaaaagcatggaagtgataaatggttggctaaaatttaggactctgcttgacagtatagcattttaggccaggcacagtggctcatgcctgtatcctaacactttaagagtctgaggttggaggatcacttgagcccaggagttcaagatcagcctagacaacataaggagatccccccgtctctacaaaaaaaaaaaaaaaaaaaaaaaaaaatagccgagcatggtggtacacgcctgtgatctcagctacttggacgtctggggtggtaggacagcttgagtccaggaggttcaagtcttcaaggcttcggtaagcctgggcaacagagtgagaccctgtcttgaaaaacaaaaacaaaaaaaacaaccaaaaacggcattacccagaacctatctactttagaacaatagcatgccctgtctgctccagctgcacctaataccagagggaactgctccaactccaaattaaaaacattatcagtgatcagaaacaaaagttccgttatgagaacctttcaaagctcagtaatagcttaaactcctggcttcttaaaggattagtaacactttgatatctgtgtatatttggctcacagaggagaaccaaataacattaccttgaaaatctaggactaagggaccttatgaatacagagggaaactatccaaggaacagacaatagcagttttaattgagtgaataaagtgatcttggtttcaaattcaactgagaaaacatgactttctccttttttctttaagagggggctactgttaaccagacatgttatctgtagtcccctgggctctacactgagaaagatgatcaagaaatagataagcctgttattcttccaaccgatggttccaatgagcacccatatcctagtcatgtgaaacaaaggggtgaaacaaggcgggtatcttggttcatgctttaattctctatttttctctgagggactttcagcatcagtcctttctgagggattaagtatcttactaaggtgttgactcttattgactacagaattcagctctttcatttagtcacaaaggcatcctagaccctaagagaatgcccatattgtagtaaagcatactatctgtagctagctttatcacaaagcctttacaaaacttggatttcataaaatcataggcggcctctagggctatcttttccaaggagacacatacattcccccttagtgttgaccctatacagaccaggcaggaggtgacacgggttaatttaaaacagccagccacatatatcgggcacagccagtgcccgatatagtcattacttggtctgtcttttggagtgcttcaaggagtatggaacaatcctgcaggaataggacataggatcctttccttttgataaggagcaggggttctgaaataaccagcaggtaaagattaggccttggggaggttctgatgagtctgctttggagcctctagacagcaagagaatagtataatagtataatacaactcaggttatactgcagaaaatgaaacataatagatggagaagtccatgcctaccataaacgtttgaaacctttgcctagagcaggcctttcttttctttcatttgcaaatttctcctgagccacctgctatgtacccagcactgacaatgaaatgttggggtggggtagaggtagggggtcacaggggagtgtccaaacacactaggtcctcatgaaatttttacttttgtacttctaaacgtcttacatggtctaaactattctcatcgataccacttccttcccctccttcttctgccattcatgtaacatattcaacatatccaacggataatgatacttgactacctataagattaagttgaaggctcgttctgtctttatcaccattaaatttaaataagaacaatagcttacatttatttactactttatagtgcatagtctaatttcacatataaatctcatttccttcccaatagctttgtgaagcttgttattctttcattagtgtatcagacactttagaggtggaatgcaggcatctattttccaatggtttttaatgttgattgagtatcagaaatgcctatggagttatattttcttttaaataagagtacagatgtgcttgaacacttagagaatctatcgcacagttgtggaattccagcaccaaattaaaatatgtgtgcctgtgtcactacactagatttttggataaaatctagtcagtttgattgaagtgcaattttgttagtgttccaataatatgatactgagttttaaatatatcagtgtatttagtagatgaccaactttcaactcacttgggccccttacagccaaggctggctgcatgggcctgcagtctgtgcacggggccacatgcctagaagagccttgtgtttggtttaatgctctgctgctgctgtcttgaaattcttaatgaattttgaaaaaaaggcctgacatttttattctgcaccagttctgcttaaagccaagggcgtctactgtagggttgctttagcatggttgtcctaatgactgaatgaaaaatgtggttgaaaaggctgcttttaaaataagcaatgaacagatcgatggttgagagttgggcgggttggggaaggtgcagggtgaggcagattatggaaggtgtgagctggcagactcagcgggcatggaacagaggccctgtgatggcgctctgcagccttgggcaggggtgaggaggggagggcttatgctgtggggatggcaagaggcagctaccagtaggggatgcacatgtgagccttgaatgaacctttgctgggctccctttccctttttgtcttccctctccaaggcactacttacttttcagctcccaaaatatggggctcagaagtggtcaatagtgaggaaaggagtggtaactgaaagaagtctagggttctctgggtggaaagactcagaggaaacattcaaaccttgatagaaaggagatgaaaaatccatccttgcctattgttgtagctatagaaccccaaaagcccttgggctgcagatgtaccccccacaaatctatttatggtctaattaaaaaattaagttgaacttaatcataacagtgtcttcttcagatatgcttatcttctccgtaggtttagttgacatatttgaaatgttttaagactaaatgagccgggtgcagtggctcatgcctgtaatcccagcactttgggaggcctaggcgggtggatcacctgaggtcaggagtttgagaccagcctggccaacatggcgaaacctcgtttctactaaaaatacaaaaattagctgtgcgtggtactgcatgcttgtaatcccagctactagggaggctgaggcaggagaattgcttgaaccccgggggtggaggttgcagtgagctgagattgtgccactgcactccaacctgggtgacagggcgagactcctcaaaaaaataaataaataaaaataaaaaaaagactaaatgaaaatgtcacattaaaatgactatacatttttctaattctggaaacccaatgtcttcagagttctcttttaaaaacctcaaggccaggtgcagtggctcacacctgtaatcccagcattttgggaggccaaggcaggaggatcacttgagcccaggagttcgaaactagcctgggcaacatagaaagactctgtctctacaaaaaaattaacaacaaaaaaaattagctgggtgtggtggtgcacacctgtagtcccagccgcttgggaggctgaggtgaggggatcacttgagcctgggaagtcgaggatgtaatgagctaagatcatgccagtgcactccagcctgggtgacagagcaagacccactctctaaaatatatatagatatgtatatatgaaattaaaaactcaaaagataaaaacctcttgattcctctgactgccacccactaaggagaaaattcccttttaaaagctggaaggtaattatatctcagcccagagtagagtggtgctgacttttctctttatggaaaatatttaccttctttgctaatataactaaaggctacaactttccataaattcatcataaaattgtgtttcatgactcatcattatctagccccttttgcctcgaagatggttttggttgtaactggtatctccccagtctctcaaaatatgaacagatgtttgttgcttctgttcccttctcctccctacctgtaatgattaaaaaggtattctctgagagttttctcatctcagtgtgaacttagtcataacagtaacttcttagtcataacagtatcttcttagtcataacagtatcttcttcagatatgcttatcggtcaatttttccatatttatattttaaattttactcttaaaaaatgaagttcttgctacataccaaatgctttaacagattattgtgtgtaatccttacaaccacctttatgacattggtattattagtcccattttcagttcatgagactcaagttttttgagctaataatttgcctaaagacatatcactttgttaaatgtctctggttcagcctgtgctggttcagagctcacactagggatgtagcctggctgttggaatttgactcctagccctgccatctcctggccaggtaaccttgagcaagttacttaacttctttgttcctcagattccacatctataatgtaacaatacctactatgtaggtttgttgtgaagtttaaatgaggaattatatggaagacatttaaaatagtgtccagcataaatattgcataataaatatcactattattggtttccaaatattctcctaatgttatggcccatcctgctgtatgtcactgaacccaagtatctctgaataactccatcaagtgctgacagccagaactgtcaattccagcttatcagatgatagcatacataattattcaagtcatgaacagcagaggcagactaagaaaactttgaaaactaagatagtaaacagacgtgagaaccaaatgcaatatgtgatccctgactggatcctgaaccagaaactatttttcttcttttgccacagaagacatttgtgggtaaaaaatgaaggtctgtaccttgataatagtatcgtattaatgttaacttcttgattcgcaatcactttctgtggtgactgtagataatatcagtgtttttaggaaatatacactgaagtattgagagataaaggggaattacatctataacatactgttaaatattataaataattaaattcatatgtacagaaagacagaagaaaggatgattaacatggtaaaatattaacatttggcaaatataggtaaagggcttgtggaaagtatttttttaaacttttctataagtctgaaattatttcaaaatggaatgataaaaatattaatcagtagaaagaacagaaagagtactagatttggagttggaagaattgagttttattctagccactatttcctagtgctcttaggcaaatcatttagactctctgagcctgtctcctaatctaaaaattgaagataataaaacctacctcattggatttagtgggcatgtaagtttctgggtgaatttataaagttgtagcacattatacaaataatacttttttaaaaaggacatatggccccatgttcccactctgaaactagtagcccaggatgggctctgctacaaatcagctacagtaaagcttcagggatgggttttctcagttatgaatgccaagcaagcagaggggaaaaactcaggtgaccttgacacttcctcttagaaattcattttgtggctcccagagaagaaaagattttgacagggaacagtctatccttaaaaaaaaaaaaaaaagatttcaaataaaagaaattgtagatataaagaccagttctcaagattggtgattttcaacttggttgtacatcacaatcaccctatggatctttaaagaaccaaaaagtagatgcttacacccccaccctggagagtctgattcattaggtcttgggtaggtcctagacgtccacattttcaaagagcttcacagacacttctgatgtccactggggttgaaagccactgccctagtattgtttataaggactaaataagatcctttatacatagtgctcaataaacattaaccctaatctcatcttttcctttctctgtgcctcagaggaatgacaaactgaaattagaaatgcagatcttgttgacaaatgatttacaataaagtttctggatgaagaaaaaaaaagaaaactactgtcctagatagttagtcaaagtaggtgcctccgaaatcagagcccaaaccaagcccatctgatatcattatatgtgatctggggaaagaataaaacccctcacttaatttggcatttactagtatccacagtaccttggaggcacttaacatggataatgtgccaaggagacaggtaggcctcaaaagatgaagtggggaatatgggcagaaaagcagagtaaacttcaacaggattaccttgggtattgataaggaaataaagcaggcttacaagatgagttttataaacaataaacagtgattcgggaaaaggatcttggagtatgtcctcgtcattccctgaatacttgggccaagactgctgtctacgaggccatcaatgctgatatgctgagtgtcctcataaaggatgttgtcaattaaacccaaggaattacagtactctttacaagaaaaacaaaccacagaatattttatttcttgggaagttcctattgctatacttcatacacatttcagttagaaaagctccaagacaaaaataatagagttagaaaatagaaataaaaattttttagaagatggaatgcctttttttttataaggacagatgagaaaagtgaaaaagctcttagattggataaaagctgagagaatacataatcagaattcatgagataatgaagtgaatagctgggatggactttgtcacttaaaattggaaagaaattgtgaaagcatatgctgaggtaatttaagatttaagagaaaattacttcatatattgcttcatttaatttttactgtgaaatgtcattatttctactcttcaagtagataaaatgagtctgagaaaggtaatttttcctaagtcatgaagttggtaggaggagaagctggggatttgaactcagaccacctgactccagagtctgtgcccagaatcactatactcctggacctcccttatactttagattttccagaaggctaaggaaagcctatatggcatagtaagattcaagttcaactttaaacttttgatttacctttgaactcaagttcaaatcaagtaaaagtcattaagagctcagctaacatctttctattcatcacttctgtatgctcacagcctttgggctgattttgaaatagaaatgctagtcttgcaatattttcagctaagccagaataagataagatgtgttgttttcctaggaattaatttctccatttctagtcttcaagttttagtaaaacgatgcttgatgacttacagcaataaattcttaactggtaatcaaaaaagaataaactgtacttctgttcataaatagaggaaagaaaaagaagcacctgcaatttgataattataataattcattatactgcttacaaaggatacagagacagtatggcaaactagaaaaacccaggattactagttaggagagtaatgttctatacactaagccatgcaattttaggtgagccattttccttctttgggcaacacattcctcaatggtaaaaccaaggtgtcggattagaatttgatt

SEQ ID NO: 402 - DNA, 112345 bp, Homo sapiens
tcagccggactttaccataaatgctgctgcccccaatcttccctaataggcctgccaaggcacagagctatttttacctccttcccttctcaggcctgcagacctctgggaggagcaggagcagcctctgctttcctccagcagccgggtccccacctggaacatctgctctgcagctcagggaagttctgctttcccaagcctcaccccatttgctggaatcttttccttacgtctgaagtcttccccaggttgggaccatttcagttcttagttattccctctgtgggtttgggactccatttgagctactcttactacctcaactctctgtcacccactggccttggtttagtgcagattcatttgaagccacctgtgattagaacacattccctcccaccccctaaaatatagacatatccctgcagattgctggagagggcagaacagagggatgccagtggcctctgcagataagtctttctccctccatacctttccctcttctctcagaatctccatctttggcatagggaagtttacctccaggccaagacttttcccaggttctatggtctgggatagttagcgtgagaagggtcacccctcgagctcttcatggtggctctcggccacaccaggctctggaggaaatatagagctggcttgctgtcccagacccctgtcttgttccgctcctctcaatgtccccagtactaagcaggtctcttaaaaaacgtcaaaagcccccctctcatcctgcgtcctccaagcagttagactaagtggaaatagctctgggcaaacattttctatctaaatagtgcttaagtaggggaagtaaagcttttaaaagccacgtatatgcctcctgggaggagtctgtcatccgtgggtaagggtggggagggggacaagtgccacttctgcctctgtcccaccacctcagataggtaccagctgacccacctttctgtctctactcttcccagatacttgtcctgatttgcatctatcttaactcctcctggggaaaccaagccaaggaccccctcgcctcaccccagatggtcactcagaacccggctcgaccaggccccagagcagtcagcagagccacaactcccggaaaggggtcttctaacttggagggtgtgggaaatccagccttccctttctttccattcccttcagcagggagaggaaggggagaggggagcatagactaacccccctgccccacacgatcccgcctccctggggttaggagcatcagcaggcctttgggaggcggggaggagccaggctggaacacttgccgcccagcccaaaatctcatccccgatggcactgcggaagcggcgtggagaggagcagcatagaaacccgagactcccaggtttattgggggttatgatccaaaagctacatttttatccaagtgtgaagaatggggagagctgcaaagaaagcaacaagtggccccgggcggagccggggggtgggggcgccagcctcctcccgccggctgcgctgctgcgcctggcccccgcccccgcaggcatgcggggtgattcacctcgcccagactgcgcccagaccgccggaccccgcaggggctgtccacccactccaccagcccctcttgcactcctgacgcccactcttccccgcccagccccgcccgcttccaggaggcccagggtgccagcgcgccgcgggtgagggtgtcctcaagggcctgaaaatgcctggtggccaggagcagagagcagcgaggggacaggggtgggccgccgaggccgatgtgggggcgcgggggcgcagggtctggggaggaggttggcggtcgcgttccccgcttggcacagcccccgctggtgcgtgcctgagccctgaatcacccgctatatcaggcccgcaggcgcagaggccccaggcccgggccccgcagccagtgtccgcttacagcggaccccaacgatcgcgagggacccctgactttcctagaaacttcccccaagtaggaagaagtttgacagagccaattagggagggagcggtctgcgaggggcagcgtcctcgagtccacccgctaattcggttctgctacaagtttgggacccgagggaaggatctgagtggggaggtgcgaggtgcagagcgcgcccctctacgcgccccaggagtccgccgctccctccaccccatcctaccccacccaaccccaccccagccgcgctcaccggaaggagggtggatctgccgggcgcccgggccaggctgggaggggagcagcgccacgggcaggtctccccaccccaactcccaggcaggggacgcgggccgggcgcgggagctctgggcgccttccgccctgtgggctcacctggtagatcatgactttaaagttgcggcgccgcagcagctcggcctcgttgacctccagcttcttgatctgccccgcctggcgctccaggctgccgcgcacggtcttcacgttgacgctgaccttgcgcaccttctccagcagcttgctcaccgtattgctcgtggtggcgtgcgccttgcccagcttgctcagctcgccctggatgctctgcactgcgccctccatctccgcctgccgctcctccagctgtgcttgagtcagctggatctggtctacggccccgatgattttgtccaggaggctcagcaccagcacgccgttcacctggtccgacttgatcagctcttctgagccggcccccgacggctcctccgctgcctgagccccagcggaggaaggctccggggcctcggcgtcggggtacccgggaagcggccgctcgacaatatagagcgtggggtcctccatggctacccggagccgtgcgggaccggccgggtggggctggagctggagcgggagacccggagagaagcaggagcggaagggaggagagctagcgggcgagagcggagagcagaggaaactcgagccacgtccgtgcgcaccgggacagcggccagaactgctgggcgggggatcggtgagctccccagctcccgggccaaactccggagtctgatcgctgattggctggccccaccccagaaagggagggaccggggcagaaggggagatcgacgaggcggggcggcggagggggacccaagagccgagcgccccacccttcccgggatggttggaatagttggagcgggagactagggcctccgctggcggcgggagcgggacgggcggaggaatgcgagctgaggaacggaatcaggttctaagagtgttgctctctgtttccctctcacttgaattgctcatccgaaaatcctcaagatctgggagccgggtggaccaggagattctgaaattataggcaaaatcttgtatttgcctttacctagattttgagcacaaaaggacccttgccctttacaatattttctaagaggcctctcggatttcctcatcaccaaccccaaccaggttactaactcaggggtaagcttagggggttgtttgtggggggcggggggagaaagagagaacgtatttggggtcacggtggtggtgaagggctgcgaagctcctctaagttctttttagaattgccctaacagagtagaattaagatgggcaatcaaacggaaaataaagcccacctcccaacccccctttctgagacagggtgtcactctgtcacccaggctggagtgcagcggtctgatcacagttcactgcagcctcgacctcttgggctcaggcaatcctcccacttcagcctcctgagtagatgagactataggcgcttgccaccacgcccagctaatttcaatttttatttttttcaatttttatttttttaagagacggggtgtacactattttgaccaggctggtctcgaactcctgagctcaagtgatctgctggtttcagcctctcaaagtgctgggagccaccgcgcctggtgtaaagccctttttaaaagcccacctctcttaggccaggcgcggtggctcatgcctgtaatcccagcactttgggaggcccaggcgggtggatcacgaggtcaggagttcaagaccagcctggcccaagatggtgaaaccccgtctctgttacaaatacaaaaattaggccaggcgcagtggctcattttgggaggcggaggtgggtggatcacctgaggtcgggagttcgacctcagcctgaccaacatggagaaaccccatctctactaaaaatacaaaattagccaggcgtggtggcgcatgcctgtaatcccagctattcgggaggctgaggcaggagaatcacttgaacccggggggcagaggttgcaatgagctgagattcgcgccattgcactccagcctgagtggaattctacagagtagaattcctcttttttccaaaagctttttcaatccttagtagaaggaatttaaattactttaatacatttctcctaaattctaaagtaagttggtaatctgccagttggtaatccactgtctgagtgcagacagagtgagactctgtctcaaaaaaacaaaaaaaacaaaaacaaaagcaacccacaaacccacgtctcacctctctctaaaactcacctttccctgtgttccccctcccaccgccccctcagaggcagctgacaccaatctcagtgagcaggatctaggagtccatttctctttcaagattccagggactaacagtaagccatcggagagaccatcaaatcccaccccctcatttgacagacaggaaaaggaaagcctgcagaagacaggtggcttgccagagatcactcgcaggttagtgttggcattggcacttgaacccaggtctggactcctgctttcatgctctttccaccttctgctctaagccttccactggggcagggagacaggcacccacagccactccccaactcccatgtgctgtttcagaagattaaccaaagcatattttcatccatgctgggtacaagggagcaggcaattctgagcaggcccaaggagggtccttagtgcagaaagtccagaaatagggaggctgcccatcctcccccattttgctgtctagcacagcactggtgctgtgagtgtctgaagtggcgccagctccctttcccacagaaaagcggcaacccttttccctccttaggaaaccacacttgggtttccccagctggctggatgatggtcctggcaaaaggtcacttctagtctggtatccattatcattaggaagagtgaaaaactggtctatggggacccagggcctcctcaacccagacagagaacccacaaactcagaaaggagaccgacagtgcagggactgggttagtgccctaacaacattgtagggttttttaagggtttacaacaccatatttgttatccgaaattctcatagaaaatggagccatcaactagggctgtttatcaggttatcctgaagtactgtttctgctagaaaggcaagatacgtggttactggtaacctctttttttcctttttttttttttttttcttgagatggagtctcactcttttgccaggctggagtgtagtggtgcagtcttggctcactgcaccctccacttcctgggttcaagcgattcttctgcctcagcctcccgagtacctgggactacaggcacgcaccaccacacccagataattttttttttgtatttttagtagacacggggtttcgccatgttgggcaggatggtctcaatctcttgagctcgtgatccacccaccttggcctcccaaagtgctgggattacaggtgtgagccactgtgccccgcctttttttttttttttttaagacagagtctcactctgttgaccctgcagcctcgaactcccgggttcaggtgatcctcccacctcagcctcccaaatagctgtgactataagcgcacaccatcacacccagctaatttttgtattttttgtagaaatggggtttcaccgtgttgcccacgctggtctcaaacacctaggctcaagggatccacctgccttggcctcccaaaatgctaggaatacaggcgtgagccacttcggctttgtgttttttccaactttttttttttttttgagacaaggtcttgctctgtcatgcaggctgagtgcagtggcacaatcacagctcactgcagtcttgacctcctggactcaagtgatcctcccacctcaccctctcaagtagcttggactacaggtgtgccaccacaccgggtaccctaacacttcaataactgttttctcacaaacaaatggctttctcatttgaggctcaagtagaattaagctagtatataagatcatatatacacatataactgctagaactggcagattaccaacttactttagaatttaggagaaatgtattaaagtaatttaaattccttctactaaggattgaaaaagcttttggaaaaaagaggagtgacagtagagaaccttataggaccttcatttcttaagtgtcccataagatccttagatgatgatgattattattattatcatttttttttttgagatggagtctctctctgtcacccaggctagagtgcaatggcacaatctcggctcactgcaacctccacctcccgggttcaagcgattctcctgcctcagcctcccaagtagctgggattacaggtgtgtgcccccatgcccagctaatttttttttttttttgagacggagtcttgctctgttgcccaggctggagtgcaatggcatgatctcagctcactgcaccttccgcctcctgggttcaagcgattctcctgcctcagcctcccaagtagctgggactacaggtgcctgccaccacgcctggctaatgttttgtatttttagtagagacggggtttcaccatgttagccagcatggtctcgatcttctgacctcatgatccgcctgcctcggcctcccaaagtgctgggattacaggcgtgagccactgtgcctggcctcgcccagctaattttttgtacttttagtagagacggggtttcaccaggttggtcagcctggtctcgaactcctgacatcaggtgatccacccacctcggcctcccaaggtgctgggattacaggcatgagccacagcacccggcctctaaaaaattttatctctatcccagcaactagtttcttttccaggagacatcaattattactatattctcttttttttttttaggtggagttttgctcttgtttcccaggctagagtatagtggcaccatctcggctcactgcaacctctgcctcccgggttcaagcaattctcatgcctcagcctcccaagtagctgagattacaggcatgtgccactacgcctggctaatttttgtatttttagtagagaaggagttttaccatgttggcgaggctggtcttgaactcctgacctcagatgattcacccacctcggcctcccaaagtgctgggattacaggtgtgagccaccatgccaagcctattattactattctcttgcggaatcttctatagactatttctgcatatatgatcatacatatatatatttcagcactttcctgttttcagttattaatatgttttatggatagttccatatcagtacatgtagaactgccttgttttccaatgtatacgtctactatatttgtttaaccagttccctatcaatggacatttacagattacaatttaaatctcatgggggaggagttgctgaagacaagtgggatttttttgtttttgttttttgcttttgaggcaggatctcattctgttgcctaggctggagtgcagttgctcaatcagggcttactgcagcctcgaactgctgggctcaagcaatcctcccaactcagcctccagagtagctgggaccacaggtacacaccaccacacctggctaatttttaaatttcttgtagagacagagtcccagccatggggttttgccacgttgcctaggctggtcttgaactcctgggctcaagtgatcctcccgtcttggcctcctgaagtgctgggattacaggaatgggccactgtgcccagcctcatcaggaaagtatttctataccacttcttcaaacaggaatgtcagaatttgtggatgagtcaagttatgtcccaggggtagtccagtgaatacatctctgactcatttaatgcctccttaatggatgatttctgtaaaagggccctacccctgcatgcctatgttggagaaaaatctgcatcaacaagtttctctcacattccttttcttactaaatgccagctaagtccaacagggggcatgctgaggcatattgtactagctccaccagcacagatgccgcaaactggagcagagcagtcctttccagagcatttcactccattccagtgaaaataagcagtttctcttcatttgtaactgcattcagcatgccattgcctgcattcagggttgttggtttgcattttccattgctcactctatttgcttgctgaaaggcacactgttccattgtgtgctttcagccactgagacagaatccataaaagggatagtgaggtaaaagcaaacaacccctttggcccagaaaaaggacaccaggatgcaacatgtcagcagttagaatcttacagggtgctctatcgtattcttccatccatctacttgttcaataaaacatgactacttcgcactagccatttactgggctagggactttaatgaggataaatcaagtctagtccttttttttttttttttttttttgagacggagtctcactgttgcccaggctggagtacagtggcgccatctcagctcactgcaacctctgcctcccagattctcctccctcagcttcccaagtacctgggatcacaggcacccaccaccacatctggctaatttttatagagttggggtttcgccatgttggccatggctggtcttgaactcctgatctcaggtgacccgcctgcttcggcctcccaaagtgctgggattattggcgtgagccactgcacccggccttttttttttttttgagacggagtctcgctgtgttgccaggctggactgcagtggcgcgatcttggctcactgcaacctccgcctcccgggttcaagtgattctcctgcctcagcctcctgagtagccgggattacaggcacacagcaccatgcccagctaatttttgtattttgagtagagatgggttttaccatgttggccaggctggtctcaaacacctgatctcaggtgatccacccaaagtgctgggattacaggcatgagacaccacgcctggccacccccagcattttttttttttttaaagacaaagtcacattctgttgtccaggcttgagtgcagtggtgcgatctcagcttgttgcagcctcgacttcctgagctcaggtgagcctcctatcagcctcccatgtagttgggactacagctgtatgccactacacctggctaaattttttttttttttttttttttgtagagatggggttttgccatatttcccaggccactcttgaactcctgggctcaagtgatctgttcacctcggcctcccaaagtgctggcattacaggtgtgaaactctgcacctggccagatgcatagtgtctgacacagctgaaagctcccccccagcatagggaaagcagtcactactctcaggaagagtggggaagggttcacaggtgagggtaggtacaaaggagggggaaaggaccccctcccaaacccagtatcttgcggtgtgaaagggcactggggaatagccaagcactgctcatctcctcttatcatggttctgccataagtcttatcagtttacatttagggagatccagcaaagggtgtaatatgtaatatgttctgttcagttttggatctgtgctgggagagatcccagggagactgtgtgttttgttaataataaacagctgggacaaatgatgtgtcttcacattgggacaaccgtctcacatgggaggctagccctcagcagctggctcacagctgccacaaacaacagtgattttttttttgccagttttataggcactattcttgtctctctgatatacatatatgaaaaatgcctataatatttgtatgtttctctttctcaaaatcccttcctttctttgccttcaaatattaatatatagggtaacttccctgaaccagaaaacagtcaaaattatttattaagtgctaatttatgcatagtttggtgctagaaaccatccaaaggacacaaccagcacttttgctgtggagtgggaattttagtttcagagaagcagtgattcaggctaacaaacagaaaatacaaaaaaacaggagaagggggctgcagaaaataaagcaaaatacatacagttttaccagcgtgggcaaagtggtaaaaccccgtctctactaaaaatacaaaaattagccaggcatggcagcgtgtgcctgtggtcccagcaactcgggaggctgaggtgggaggattgcttgagcccagggggcagaggctgcagtgagccaagatcgcaccactgcactccagcctgggtgacagagtgagaacctgtctcaaaaaaaaaagcaaaactaagaaaccctagattccaccaattgtttctccttttctttctttctttcttctttttttatgttgttgcccaggctggtctcaaactcctaagctcctgcctttgcctccaaactgttgggattacaggcatgagccaccacacccagccttttctaattttatttgaactctgatttagcactgctgaccaatttatctttgagattcttccctcttagccttggacactgtactatttttatttacttgtcccatttgctagcttattttttcttcctttcattttctttttttaaatagctttatttatttatttatattgaaacagggtcttgttctgttgcccaggctggagtgcagtggcatgatcacagcttactgcagcctcaacctcccaggctcaagcaatcctcctacctcagcctcccaagtagctgggactacaggcatgcaccaccacacctgacttacttttgtatttttgtagagacaaggtctcactatgttctccaggctggtcttgaactcctgagctcaagcgatccgcctgcctcagccttccaaagtgctggggttacaggcatgagccactgtacccagctaattttcaaaaattgtcgtagagatgggatctcgctgtttcccaggctggtttcaaactcctaggctcggcttcccaaagtgttgggattacaagcataaactggtacatttggacaaaaaaaaaaaaaaagcttttaatactgctttaaaaggttaaacaatataactttattgaggtagaattcacataccacacaattcacctaaagcatacaattgaatagattttaccatattcacaatgttgtgcaagaatcaactttcatcagcccccagaaagcccccgacaaagaaaaaacactaaagggagactttatcctaaagaatgtttgcaaggaggggaaaaagactgttgcaatacggggagggagtctattgcaatagggagaaggatcggcccatagttctgcaaatgtcttaagggccagacctttttccttttatagagaggagtaaacaaagctagaaagaaccaggtgtagagaataggaggaaagtggcctgatgagagaatagatcagagaatgttttaccctgaggtcaggctatcctcaggaggggttgtgtgctggctcaggcccagtgagggtgggccagagttcagggcctggaggaagaagaaaagcttaaacaaaatgtgttattttttttttttgaaacggagtttcgctcttgttgtccaggttggagtgcactggcgctatcttggctcatagcaacctccgcctcccaggtttaagagattctcctgcctcagcctcccgagtagctgggattacaggcatgcgccaccatgcccggctaattttttgtatttttagtagagacagggtttctccatgttggtcagcctggtctcgaagtcccaacttcagattacaggcttaagccaccgagcccagccttttatttatttatttatttttgagacggagtctcactctgtcacccaggctggagtacaatggcgtgatctcggctcactgcaacctccgcctcccgggttcaagtgattctcccacctcagcctcctgagtaactgggattacagacacacgccatcatgcccggctaatttttgtatttttgtagaaacgggtttcactatgttggccaggctggccttgaactcctgacctcaggtgatctgcccaccttggcctcccaaagtgctgagattacaggtgtgagccaccacgctgaaccaacaaaatttgtttaatgagcattttgttcatcgtgatcagtgttgggaaaaccagtttagctggtcattcatgaggcagagaataagaatttgaagttctgtgtctgttcctgtcacaggtaaacaatggggggcatctgcgagtcacatggggaagggtggttcttggcagtaaacaaaaacataggggattcctttaaccttggatgttttccaagagcacagggctcaggtgaaattcaccactgttacctcatacccattagctgtcactccccactcctctcttccctgtcccctagcaaccagtaagttttaagtctctatagattttcctgttctgaacacttcatatgaatggaatcatacaatttgtagccttttgtgtctcgcttcttttacttagcatgttttcaaggttgatctatgttgtagcatgtatcaatacttcattcctctttatggctatattccgttgtataaatatgccccatgctgtttatccattcatcagctgatggacgtttgagttgtttccatttttttgtttttttaagagacagtctccctgttgcccaagctggtgtgcaatggcacaatcatggctcactgcaacctcaaactactggtctctagccatcctccttcctcagcctcccaagtagcttggactactggtcacaacaggctaattttttttttagacggagtcttgctctgtcacccaggctggaatacagtggcacaatctcggctcactgcaacctctgccccctgggttcaagcaattctcctgcttaagcctcccgagtagctgggattacaggtgcgcatgaccacgtctggctaatttttgtatttttagtagagacggggtttcaccatgttggtcaggctggtctcgaactcctgacctcataatccacccacctcagccttccaaagtgctgggattacaggcgtgagccaccatgccccgcctaaaccaaatatctttcctcaaaagctagaatgcttcttggcttatttctgttgatggtgggaccgtcctatcaaacaccagagactccaaccttagaattatatttatctcctctctttctctcatctactaaagcaaatgaaatcccagatcctgccttccttccttcattatcactcccctgtaattcccatttctgtgactgtctgtctgatcctgttgttaccagctgatggctgttactgtactttcctagtttgtctctgtgtctccaaccttttccttccaattcataatgcattttagaatgaaaattgatttgaaaaactgtaaatgatagtttggaaggtgctgggactagaaaaaaggagatctaacaggagactactgcaatagtcccagcaggggaagatgatcatttgaactagagcattacggggcacagagagaggactgatgggtgagcactatagcatgaaaaccattagggcttgatgaatgagtacatgtagatactgaaggagaaggaggagtctaaaatattacaattttggctgggtgcagtggctcacgcctgtaattccagcactttgggaggccaaggcaggcggatcatttgaggtcaggagttcaagatcaccctggccaacatggtgaaaccctgtctctaccaaaaaatacaaaaactagccgggtgtggtggcgcatgcctgtagtcccagctacttgggaggctgaggcaggagaatcacttgaacccgggaggtagaggttgcagtgagctgagatcacgccactgtatcccagcctgggtgacagagcaagactctgtctcaaacaaacaaacaaattggcaaataaagagaatcaatgaagcattaatcctaccttttctggccggatgaagtggctcatgcctgtaatcctaacactttgggaggccgaggcaagaggatcacttgaggtcaggagtttaagaccagcctggccaacatggtgaagccttgtgtctactaaaaataccaaaattagccgggcgtgcttgtgcacacctgtaatcccagctattcgggagactgaggcaggagaatcacttgggcccaggaggcagaggttgcagtgatcactccattgcactctagcctggtggacaagagtgaaactctgttccaaaaaaaaaaaaaaatcttaccttttctgtttggattgtacctctgtgtaaccaaatagcggctgggtgaaggaaagcacttatttataaaataatttcagctcataaataaagaaggaatgatggattaaaatgtcactattttgtagcctctagtgaaaaaatgagctaatgatcattaatgcccgctaaaactattaggcagaaaattgtggggaactctattatatcaaagtaacaactcaacccactcactaatctttgtatttatttatttatttttttgaggcgggagaatggcttgagcctgggaggtggaggctgcaatgagctgggcttgtgccactgcactccagcctgagcgacagagtgagaccctatctcaaaaaaaaaaaaaatttaagtatgatagcagcattgtggttatgtttttaaaaaattcgtacatttttgagatatatactgaagtatttacagatgatatgatatcacatctaagatttgattcacaataattctggcggaagtagatgggatataaatgaaacaagctggactatttgttgattatggttgaagctgggtgatatgtacatagggattcattatcccgtctctgccttctgtatccttaggttccacacccatggattcaaccaactgtggatagaaattattaggaaaaaaattccacaaaattccaaaaagcaaaatatgaatttgccaagtactgtgttgaatccacaaaaatgaagtgatgtgtgggcatcgtattaggcctaagtaagctagagatgatttaaagtatatgagaggatgtgcattaggttatatgccaatactacaccattgtattgtattgtattgtattgtattgtattgtattgtattgtattgtattgtattgtattgtattgtattgtatggtattgtattgtattgtattattttttgagacagggtcttgctctgtctcccaggctggagtgcagtggcacgatctcggctcactgcaacctctgacacctgggttcaagtgattctcctgccacagcctcccgagtagctaggtttacaggcacccaccaccacgcctggcttatttttgtatttttattagagacagggtttcaccatgttggccaggctggtctccaactccttacctcaagtgatctgcccgcctcagcctcccaaagtgctgggattacagacgtgagccaccaagccccgcctgaagtttcccataataaaaaatactaaggttgttttaaggatgaaatgtgttcacatctgtaaagggacatatcaaaatgtttgatacacaatgtgtggcaaataatgtgcatgacccttttccctttctctcacttgaaccaattcagaactggtgttcaaagagactgtttctgttaaacccattttgttgcacaagagaagagccccttcctttcaactttccagctggaaccaagaccagacctttcaaacaagccactttcagtaaacgcagtaagtgtttagcagctgtgcatattaaagcaaaaccatttcatttgtggaatcgggcccttttcccaggaaacggtgtttccatttcacaacctaacagaacaggaagagtgtaaactcttgttcagttacagattccttgtgcttcacttagatttccacatttctattgtgctctgagtgtgagagtccagctgtgcgttggtggagtgactcatttttccatggagacgtgtattcctatgaatcccaggggcctctgattggtatgaaagagcaatcagcacagatgtagtccacagatccatcatatgacttaagagagatgatttaaacggtttttccatgggcttaaattgaaagcgtcaactgagctagtcagattattcatatgctccaaaccctttagtgtttacaagtggctaagagtggctacttgagaccacaaaggaatattaatacaagagaaacaaaagcataatctgtattctttgggtgtttaaaaatctcaatgagggccgcgcgcggtaggtcatgcctgtaatcccagcactttgggaggccgaggcaggcagatcatttgaggtcaggagtttgagaccagcctgggcaacatggcgaaatcccgtctttactaaaaatacaaaaatcagctgggcatggtggagcgcgcctgtaatcccagctactcgggaggccaaggcaggaaaaggttgcttgaacctgggaggcagaggttgcagtaagccaagatcatgccactgcactccagcctgagtgacagtgagactccgtctcaaaaaaaggccaggcgtggtgactcacgcctgtaatcccagcactctgggaggccgaggcaggtggattgcttgaggtcaggagttcgagaccagcctggccaacatggtgaaaccctgtctctactaaaaacacaaaaattagccaggtgtggtggtacatgcctgtaatcccagctacttgggaggctgaggcaggacaatcgcttgaacctgtgagacggaggttgcagtggccaagatcgcatcactgcactccagcctgggcgacagagtgagactctgtctgaaaaaaaaaaaaaaaaatctcattgaggaaataaatgttaagaagtagaagaagaattcccaaataagcaaattatatacaatacaaatggatataaaatatatcaatcaatgtttagcagctccaggataagagtaatcaaaattgaagtggctatctggaaaaaaaattcacttttatttttatttatttattttattttttgagacggagttttgctcttttgcccaggctggagtgaagtggcacaatcttagcttaatgcaacctccacctcctgggttcaagcaattctcctgcctcagcctcccaagtagctgggattataggctcctgccaccatgcccagctactttttgtatttttagtagggatagggttttgtcatgttggctaggctggtcttgaactactgacctcaggtgatctgcccacctcggcctcccaaagtgctaggattacaggcatgagccactgtgcccggccaaaaaattcacttttaaaacgtttaaattattttaaatttacagtgtttttttttttttttttttttgagatgatgtcttgctctgtcgcccaggctggagtgcagtgatcttggctcactgcaacctccacctcccgggttcaagcaattctcctgccccagcctcctgagtagctgggattacaggtgcatgctgccacatctggctaatttttttgtattttagtagagatggggtttcaccatgttgcccaggctggtcgtgaactcctgagctcaggcaatctgcccgcctcggcctcccaaagtgctgggattacaggcgtgagccaccgctcccggcccagaattgttttttaaagtacaaaagtattatttcttcatgaactatttgcaagtaagttgacaacctgacaagttttatcacccccaaatactttagtgtgtattttctccaaacacacatacataaccacatagacaacatacattttgtaaccataatacaataatcagtatcaggaaattaatcctcagcagctgataaaatttcaccatttatcccaataatgtcttttatgcataaacgatccaattagacgtaatgcttagcagttactgcatcgttttagtatccttcagtcagggaaatattctttctttggctttcataaccttgacacttttgatgatcataggacaattaatctgcaaaatgttgctcagtttggacttgtctgatgtttcctcatgattagatttaggaaatgtattatctttagcaggaatagcatgaaagggatgctgtgctctcattgcatcctgtcaggtggtacacaattttgatttccccattactagtgatgttagccttgatcattaggttaaggtggtatctgccagacttttccagtgtcaggttatctttttttttttgagatggagtctccctttgttgcacaggctaaagtgtagaggcacgatctcggctcactgcaacctccacatcctagtttcaagtgattctcccacctcagtctcccaagtatctgggattataggcaagcgccaccacccctggccaaatatatatatatgtatatggagagatagagagagagagagagagatgaggttttgctatgttgcttaggctggtctagaacctctgggctcaggccgggtgctgtggctcaagcctttaatcccagcattttgggaggctgaggtgggcagatcacttaaggccaggagagaccagcctgggcaacactggcgaaaccccgtctctactaaaaatacaaaaactagccaagtgtggcagtgcacacctgcagtcccagctactcaggaggctgaggcaacagaatcacttgagcctgggaggcaaaggttgtagtaagcctagatggcgccactgcactccagcctgggcaacagaggagactccatgacaaaaataaataaattaattaaattaaattaaaacaataaataaaacccctgggcccaagtgatcctcctgcctcggcctcccaaagtgctgggattacagacgtgaaccacctcacctggccctatttatttatttatttatttgagatggagtcttgctctgtcccccaggctgggctggagtgcagtggcacaatctcggctgactgcaacctctgcctcccgggttcaagcaattctcctgcctcagcctcctgagtagctgggattacaggtgcacaccaccatgcccagttaatttttgtatttttagtagggacggggtttcaccatgttggccaggctggtctcaaactcctgacctcaagtgatctgccctccttggcctcccaaagtgctgggattacagccactgtgcccagcccttatttatttttttgagacaaagtctcactctgtcgcccaggctggaatgctgtgccatgaacatggctcactgcagcctcaacctcctgggctcagcaatcctcccacctcagcctcccaattagctaggactacaagtacatgccaccttacctgactaattttttgtgttgtttttttttttgtaaagacaggattttttttttatttttttattttttgtagagacaggatctcccaggctggtctcaaattcctgggttcaagcaatcctccggccttggcctccccagctgttgggattacaagtgtcagccactatgcccggactatttaaaaaaaatttttttggagagttttctggtaaaaactggaaaacctgctagacggattctaaaagagctgtaatacttgatttctttgacattttaatttttagtctgaaattttcatttccaaattttcaatttctatgcacaaaattctttttttttcttttttttacagtttttcctcctctgctgaggtttcttttttttcctttttttttctttttgagatggagtcccactctgtcgcccaggctagagtgcaatggcgtgatctcggctcactacaacctccacctccccggttaaagcaattctcctgcctcagcctcccgagtaggtaggattacaggcacccgccatcatgcccggctaatttttgtatttttgtagagatggagtttcaccatgtttgccaggctggtcttgaactcctgacctcaggtgatctgcccaagttggcctcccaaagttctgggattacaggcaggagccactgcgcccgagtggaaagttctaaaattaattgtggctatggttgcacaattctgtgagtattaaaaattgttgacttgtacgctttaaatgggtgagtcgtatggtatatgaattatatctcaataaagctattacaacaaaagattcagcagttttcaaaatagaacatatatatacttttttttccttttctttttttttcttttgcagaaacaggaactatgtgtcccaggctggtctcaaaatcttgagctcaagtgatcttcctgacccagcctcccaaatcgctgggattacaggtgtgagccaccatgcctggcctgaaaatagaatatttggaaataaaatgataaattcaataaatgaaatccccaagattggaggagaccctaaactgaatgaaaacagaaattaactcatgttacaaatgaacaacaaaactgtactgaaggagaagtggtatgggaatagcaattatgacattatattgtgcatattatagaattaagcaaatgacatataaaagaatgtggaagctagagttctcactgtaggaaaaaagtagatttaaatatgaattagggaatacaaaggaaccttagatgggtggaactggtgttagaggcatcagtataaacccataacttcatatacatttgtagagatagagctagaggtttggcctctgtgtgttgaaggcttagaagcaataacacaatgtaacaatgagcaggcttggtaccaagatcttggtttctaaatattattcctcacaacaaagaaacagcttcttagagaaatggatgacttcagggctggaacaaggaaagtataagctaagcttaaaatatcctattgtgatagaaattaaggaagtcccctgccacccccaacaccccagcaaaatgatgggaatatgtcaaaaaacacaggaggaagttccaattatggctgagtaattcccatcacaccaagtcttctgtaaataagaatgatatactcagagcaaaatattaaagaacaaacaaaaactacctgaaggcattagcaaacaacaggaggaatatactgcacagaggtggatacctggaagagaagaggactgaatgggtttcctgtgtttttacagcttttagtctaagggaagtccaaagtctgcaaagtgagtggttaaaacaaagctgggggtagtggtgtgcgcctgtagtctcacctactcagaaggctgacgtgtgaggaaaccgtgagcacaggagttcaaggctgtagagcactaagattgtgcctgtgaatacccactgtattccaacctaggcaacacagtaagacctcatctcttttttttttttttttttttgagacagagtttcactctgttgctcaggctggagtacagtggcgtgatctcagctcacagcaacctctgccttccgggttcaagtgattctcctgcctcggtctcttgagtagctgggactacagctatttttagtagagacagggtttcaccatgttgcccgggctggtcttgaactcctgacctcaggtgatcagcccatttcagccttccaaagtgctgggattacaggcatgaaccactgtgctcgagatcttatctcttaaaacgacgacaacaacaacaaaaacaaaacaacaaaaacccaaaccctgcagtcttactagcttgaattgttcagggcaaccccagcaggtggaaataatgggaggaaatcctatcaaaataagagccacagagagggaggctcaaattctgtgcataaactatagtcccagctactcgggagtcccagtacctgtagtcccagctacttgggaggttgaggtgggaggctcgcttaagcccagaaagtcaaggctgtagtgagctgtgatgatgccactgcacaccagcctgggtgacagagtgagaccctgtctcaaaaaaaaaaaaaaaaaaaaaaattcagaactttaaaaaatcaccctgaaaagaaaccccatgcccttttattatttttttcacttttttgactttattattttttctttaaaacaatatttattcttttttgttgagactgggtgtcactatgttgcccaggctagtcttgaactcctgggctcaagccatcttcctgcctcagcctcccaaaatgctgagattacaggtgtgagccactgtgtctggccaagaaaccccatgccctttagccatcacgttccattctccccatcaccccagccctaggcattaataatccactttttgcctctatagatttgtctactctagacatatcatataaatgcagtcacatatgtggtcttttttgactgacttctttcacttactatgttttcaaggtttttgttgtaacatgtgtcattacttcatccctttttattgctgaataacatctcattgtatggctatactacactttctttatccattcatccattgttgaacatctgggttgtttccaattttgggctattgtgtataatgctgttatgaacatttgtgtacacgtttttctgtggacatttggtttttatttctcttaggtgtatacctaggagtggaattgttggattatatggtaactctatgataagccttttaagaaattgccagactattttccaaagtagttgccccattttacatcttcaccagtagtgaatgggggttccgatttctccatatcttcaccatgaatctttttaagaaaatagattattgaccagaggtcaggcattcgaggccagccgggccaacatggcgaaatccctcctctaataaaaatacgagtattattggctgggcacggtggctcatgcctgtaatcccaacactttgggaggccgaggcgggtggatcacgaggacaggagattgagaccatcctggctaacacggtgaaacactgtctctactaaaaatgcgaaaaattagccaggtgtggtggcgggcgcctatagtgccagctacttgggaggctgaagcaggagaatcgcctgaacacaggaggcggaggttgtagtgagctaagatcatgccactgcactcctgcatgggtgacagagtgagactctgtctcaaaaacaaaacaaaacaaaaaacaaatattagcaggctgtggtgatgcatgcctataatctcagctactcaggaggctgaggcaggagtattgcttgaacccggggaggcagaggttgcagtgagctgagatcgtgccattgcactccagcctgggcaacagagcaagactctgtctcaaaaacaaaacaaaacaaaacagattattgatatataattcacataccacacaattcactcaaagagtgcaattcaatggttttggtatatcatgttaatttttaaaattgtggtaaaatataaaagttgccattttaaccattatatatataaatatatgtgtgtgtgtgtgtgtgtgtgtgtgtgtgtgtgtatatatatattttttttttttttttgagatggagtcttggtctattgccaggctggagtgcagtggcatgatcttggctcactgcaacctctgcctcccgagttcaagcaattctcctgcctcagcctcccaagtagctgggactataggcacacaacaccatgctcagctaatttttgaatttttaaattcttactccttctaggactctgacgacataattttctttctttctttccttttttttttttttttttttgaggcagagtctcactctgctgccatgtgaactatgttggccaggatgaccttcttgatctcttgacctcgtgatccgcccaccttgacctcccaaaatgctgggattacaggcgtgagccactgtgcccggccatatatatatatatatatatatatatatttttttttttttttttgtaatatagagacggagccttgctatgttgctcaggctactcttgaactccaggcctcaatgtattctcccacctcagcctcctaaagttctgggattgtagaaatgagccactgtgcctggtccccattttaaccttttttttttttttgagatggagtcttgctctgttgcacaggctggagtgcagtggtacgatctcggctcactgcaacctccacctcttgggttcaagcaattcttctgcctcagcctcccgagtagctgggattacaggcactcgccatcatacccagctaatttttgtatttttagtagagatggggtttcaccatgttggacaggtagtgctcgaactcctgatctaaggtgatccacctgcctcagcctcccaaagtgctgggattacaggcatgacaccgcgcacagccttaaccattttttaatgtacaattcagtggcattaattacactgacaatgtgcataactatcaccactatctatttccaaaataaaagagaaattctgttcccattaaacaacaattctccattccctgcttctcctagcccctggtaatctgtaatctactttctgtctctataaatttgcctagtctagtctagtctagatatttcacttaagtggaatcatacaatatttgtccttttacaatctgccttatttcacttagcatgttttcaagtttcatccatgttgtagcatgtgtcatactttcattcctttttatgaaatttaattttaatattaaagaatatttcagtccaggtgtggtggctcatgcctataatcccagcactttgggaggctgaggtggtcagattgctttgagcttaggagtttgagaccagcctaggcaacatggccgaaccctgtctctactaaaatacaaaaattagccggccatgatggcgggcgtctgtaatctcaagtactcgggaggctgaggcaggagaatcgcttgaccccgggaggcagaaggcggaggttgcagtgagccgagattgtgccactgcactccagcctgggcagcagagcgagactctgcctcaaaaaagaaaagaaaagaaagaaagaaaggggagagagggagagggagagagggagagagggagagagggagagagggagagagggagggagagagagagaaagagagagagaaagagagagagagagagaaaattatgtcgtcagagtcctagaaggagtaagaatgtaagaccgaaaacttattcaaagaaataatgggctgggtgtggtgattcacgcctgtaatcccagcactttgggaggccgaggcaggaggatcacgaggtcaggagatcgagaccatcctggctaatacagtgaaaccccgtctctactaaaaatacaaaaaaaaattacccgatgtggtggcgggcgcctgtagtcccagttactcgggaggctggggcaggagaatggcgtgaacccgggaggcggagcttgcagtgagccgagatcgcgccactgcactccagcctgggtgacagagcgagactccgtctcaaaaaaaaaaaaaaaaaaaaaaaaaaaaaaaaaaaaaaaaagaaaaagaaaaaaaaagaagaaataatggcagaaaattcctcaaatttgacaagagacctagaactacaagttcaagaagctgagaaaaccacaaacatgataaactcaaagaaatctataccaggacacgtaataatctaactcctgaaaactaataacaaagaaaaaatcttgacagcagtaagagaaaaacatctttctcataagggaaaaacagattgaaccacaatagatttctcaccagaaactaaaaaaggccagaagaaagtggcacaacttttttcaaatgctagaagaaaaaaactatcaaagatgaaagagaaatcaacacattttcagatgaagaaaaactaagagaatttgtcatttgtagatctaccctttaaaaaagtggctaaaagggggccgggtgcagtggctcatgcctgtaatcccatcactttgggaaaccgaggcaggcggatcacttgaggccaggagtttgagaccagcctggccaacgtggcaaaacctagtctctactaaaaatacaaaaattagccaggcatagtggcacatgcctgtagtcccagctactctggaggctgaggcaggaaaatcggttgaacctgggaggtggaggttgcagtgagcagagatcgcaccactgcaatccagtcttggtgacagggcaagactccatctcaaaaaaaaaaaaaaaaaagctaaaggaagttcttgaaaagaaagggaaatgataaaagaagggaccttggaacatcaaggatgaaaaaagaacgtggagtggcccacacttgtaatcccagcactttggaaggccgaggcgggcggatcacgaggtcaggagatcgagaccacggtgaaaccccgtctctactaaaaatataaaaaattagccgggcgtggtggcgggtgcctgtaatcccagctactcagagaggctgaggcaggagaatggcgtgaacccgggaggcggagcttgcagtgagctgagatcgcaccactgcactccagcctgggtgacagagcgagactctgtctcaaaaaaaaaaaaaaaagaaagaaaaaagaacgtggaaagcaaatatatgagtaattgcaatatactttccttcttgtattagtcatctagggcttccataacaaaatactgcagactgggtaacttaaccaacagaatttattttctcacagttctggaggctggaagtctaagaccaaagtgttggtaggtttggtttttcctgaggcctcttttcttggcctgtagatggccaccttcttgctgtgtcctcccatggccttttgtctgtgtgtgaccactcctggtgctttttcctcttctgaaaaggacactgggccgggcgtggtggctcacccctgtaatcccagcactttgggaggccaaggcaggcggatcacctgaggtcgggagttcgagacaagccaacatggagaaaccccatctctaccgaaaaaacaaaattagccgggctaatccaacaggactggtgtccttttttgtggggggggacggagtcttgctctgttgctcaggatggagtgcagtggcacaatctcagctcactgcaacctccacctcccaggttcaagtgattctcctactttagcctcccgagtagctgagattacaggcatgtgccaccacacccagataattttcttttttttttttttagtagagacgggggtttcaacatgttggccaagctggtctcaaactcctgacctcaagtgatcctcccacctcggcctcccaaagtgctgagattacaggtgtgagccaccaagcccggctggtgtcctttttttcttcttttctttttttttttttgagacggagtttcactcttgttgcccaggctggagtgcaatggcgtaatctcggctcacagcaacctctgtgtcccgggttcaagcaattctcctgcctcaccttcccgagtagctgggattacaggtgtgtgccaccactcctggctaatttttttgtgtttttagtggagacagagttttgccatgttggtcaggctggtctcaaactcctgacctcaaatgatctgcccatcgtggcttcccaaagtgctgggattacaggagtgagccaccgtgcccggccctcatttaatcttaattacatctttaaaggccctgtctccaatgtacagtcacaatagaggttagggattcaacataggaatttgggaagacacaattcagtctataacacttctcctccctctccctctccctctccctctacccacggtctcactctccctctccctctccccacagtctccctctccctctctttccacggtctccctctgaggccgagccgaagctggactgtactgctgccatctcggctcactgcaacctccctgcctgattctcctgcctcagcctgccgagtgcctgggattgcaggcgcgcgccgccacgcctgacaggttttcgtatttttttggtggagacggggtttcgctgtgttggctgggctggtctccagctcctaaccgagagtgatccgccagcctcggcctcccgaggagccgggattgcagacggagtctcgttcactcagtgctcaatggtgccctggctggagtgcagtggcgtgatctcggctcgctacaacctccacctcccagccgcctgccttggcctcccaaagtgccgagattgcagcctctgcccggccgccaacccgtctgggaagtgaggagcgtctctgcctggctgcccattgtctgggatgtgaggagcccctctgcctggctgcccagtctggaaagtgaggagcttctctgcccggccgccatcccatctaggaagtgaggagcacctcttcctggccgccatcccatctaggaagtgaggagcgtctctgcccggctgcccatcgtctgagatgtggggagcacctctgccccgccgccccgtctgggatgtgaggagcgcctctgcccggccgtgaccccgtctgggaggtgaggagcgtctctgcccagccgccccgtctgagaagtgaggagcccctccgcccggcagccgccccctctgagaagtgaggagccccctccacccggcagccaccccgtctgggaagtgaggagcgtctccgcccggcagccatcccgtctgggagggaggtggggggtcagcccccgcccggccagccaccccgtccgggagggaggtggggggtcagaccccacccggccagccgccccatccgggaggtggggggcacctctgcccagccgcccctactgggaagtgaggagtccctctgcccggccaccaccccgtctgggaggtgtacccaacagctcattgagaacgggccatgatgacaatggcggttttgtggaatagaaaagggggaaaggtggggaaaagattgagaaatcggatggttgctgtgtctgtgtagaaaaaagtagacatgggagacttttcattttgttctgtactaagaaaaattcttctgccttgggatcctgttgatctatgaccttacccccaaccctgtgctctctgaaacatgtgctgtgtccactcagggttaaatggattaagggcggtgcaagatgtttttgttaaacagatgcttgaaggcagcatgctcattaagagtcatcaccactccctaatctcaagtacccagggacacaaacactgcggaaggccgcagggtcctctgcctaggaaaaccagagacctttgttcacttgtttatctgctgaccttccctccactattgtcctatgaccctgccaaatccccctctgcaagaaacacccaagaatgatcaataaaaaaaaaacaaaacaacaacaacaaaaaaaacacttctcctcttgagttttctcaattatgtttgatggttgaagcagactgtgtaacattgtccaatgtggtttgcaaagtatgttgaggaaatatttaagacaattatgttgtaaatgggaaagtaaaaagactaaaatggaggtaagagttttatacttcactcaagctgataaaaatattgacatcagttggccaggcacagtggctcacgcctgtaatcccagcactttgggaggccgaggcaggtggatcacctgagttcaggagttcaagaccagcctggtcaatatggtgaaaccctgtctctactaaaaatacaaaagttagccgggcatggtggcacatgcctgcaatcccagctactcaggagactgaggcaggagaatcgcttgaatctgggaagcagaggttgcagtgagccaagattgcgccactgcactccagtctgggcgatagagagagactccgtcttaaaaaaaaaaaaaaaaaagaaagaaaaaagaaaaaatattgacatcagttgactgtgataatttatatatgtataatatgaaacccattacaaccacttaaaaaatctacacaaagagatacactcgggccaggcgcggtggctcacgcctgtaatcccagcactttgggaggccgaggcgggcggatcatgaggtcaggagattgagaccatcctggctaacacggtgaaacctcgtctctactaaaaatacaaaaaaattagccgggcgtggtggcgggcacctgtagtcccagctactccggaggctgaggcaggagaatggcgtgaacctgggaggcggagcttgcagtgagctgagatcgcgccactgcactccagcctgggcgacagagcgagactccgtctcaaaaaaaaaaaaaaaaaaagagatgcactcaaaaacactataggaaaattaaaatgggatttaaaaaaaaaaggtacaagtagcccacagtaagccagaaaaaatcaaacacagagacaacaagaggaacaagcagaaaacaaaaaataaaacagcagacttaaaccttttatttatttacatacttatttttttagcaatggagtcttgctgcaagagagcagtggcatgatcgtagctcactacagcttcggactcctgggctcaagtaatcctcccacctcaacttcccaagtagttgggactacaggtgcacatgccaccactcctggctagttaaaaaaaattttttttttttgtagagatgaggtcttgctatgttgctcagactggtctcaaactcttgggctcaagcgatccttctgcctcagcctctcaaagtgctggggttacaggcatgagctaccacacctcgcctttaagccttaaggtatcaataattacattaaatgtaaacaaagtgcaccaattaaaaagcagactttggccgggcacggtggctcatacctgtaatcccagcactatgggaggccaaggcaggtggattacttgaggtcaagagtttgagaccagcctggccaacatggtgaaaccccatctctactaaaaatacaaaaaaattagctgggtgtggtggtgggcgactgtaatcccagctactcaggaggctgaggcaggagaatcccttgaacccaggaggcaggggttgcggtgtgctgggatggtgccaccacactccaacctgggtgacagaacgagactcaatctcaaaaaatacaaaaataggccaaggacagtggctcacacctgtaatcccagcactttgggaggcctaggtgggtggatcacctgagatcgggagttcgagaccagcctgaccaacatggtgaaaccctgtctctactaaaaatataaaattagctgggcgtggtggctcatgcctgtaatccaagctacttggggactgaggcaggagaatcccttgaacccgggaggcagaggttgcggtgagccgagattgcaccattgcactccagcctgggcaacaagagcgaaactctgtctcaaaaaaattaattaattaattaattaaagttaaaaaagcagacattgacaatggattaaaaatatgacacaacaatatgttttcttttttctttttctttttctatttttttttttgagatggagccttgctgtgttgcccaggctggagtgcagtggcactatctcggctcattgcaacctccgcctcccaggttcaagggatcctcctgcctcagccccccagcagctgagattacaggcatgcattaccatgcctggctaatttttgtatttttagtagagatgggatttcgccatgttggctaggctggtctcaactcctgacctcaggtgatccacccgcctcggcctcccaaagtgctgagattacaggcatgagccaccgtgcccggacaacaatatgctgttttcaagaatctcatttcaggccaggtccagcggatcacatctgtaatctcagcacttcaagggactgagtagggaggctcatttgagtccaggtgtttgagtgcagcctgtgcaagatagtgagacattgtctccacaaagaatcaaaagattagtctggtttggtggtgtgtgactgtggtcccagctactcaggaggctgaggcgggaggactgcttcagcctggaagttgaaggctgcagggagtcatgattgcaccattgcactccagcctgggcaacatagcaagagagtctttttagaaaaaaagaaatgggtcgggcgctgtggctcatgcctgtaatcccagcactttgggaggcagaggcaggcaaatcgcctgaggtcaggagtttgagactagcctgaccaacacggtgaaaccctgtctctactaaaaatacaaagattagccaggtgtagtggtgtgcacctgtaatcccagctactcgggaggtggaggttatggtgagccaagatcgcagccctgcactccagcctgggtgacagagcaagaccccatatcttaaaagaagaaaagaaaattttactaagtatatactgaataccaggtaccaaaataggcagtgagaatacaataagtgagatacgcagggtcccttctcttggagctttatgttctactgaaagttagatctctcctttgaacattgaatcaactagatcttttctattagaattttccgatgtattcattccacgtctccctttctttctcgaagtcactagaaacccaatatagaaacatttgccagattttccacttcagaaatctcgaactagtttctcactttcctggacaaatatttcaggtctagtgtcacagatgtttttcagccttgtgtcactcagccctttccctcattcccatcccaagatttctcatgttttccaaatttcatttccttaaaaagcctctgcatagcattcttaacttccacaagttaagaggctcactgcctcatgtgtctgtcacaggagtcatgagggttgcataaaataaaatgttacatgccttaggctcatttatatctccttgtccatgcaatcattagcagagcttccgaggaagtctcaaaatctattaggtttttactttttaccaaaaggcctttaatcttaaacactcacaggtttgaaagtaaaagcagaagtattttaaggaactcacagtgaagttgtaaaagggactacttctatggaaacaaactgctaatcaacaggtcacctaaaggttgtagcagtagaaatgtctcaatgaacgctcatatcagattcttggtagaacagttttaagaatcagaattcattttcacataaaaagaaaacttttaaaaatggaattctggttgcaaaaaggaaaacatagggcaggtgtggtggcttacgcctgtaatctcaggactttgggaggcagaggagggcaaatcacttgaggtcaggtgttagagaccagcctggccaacatggtgaaaccctgtctctactaaaaatacaaaaaaattatccgggcgtggtggcaggccctgtaatcccagctactcgggaggctgaggcaggataaatgcctgaacccaggaggcagaggttgtagtgagacgagactgcgccacggcactccagtctggatgacagagtgagactccgtctcaaaaaaaaaaaaaaaaaggaagaaaagaaaaaaaaattcatgtataacggggaacctgtgaaggtggcctcatttggaaataggatatttgcagatgtaatcaggttaagatgggatcatactggattaagtggtgccctaatctaatggctggtgcccctataagaagaggagaatttgcctacagacagagacacatagagaaggccgggtgcagtggctcactcctgtaatcccagcactttgggaggctgaggcgggtggatcacttgaggccaggagttcgagactagcctgagcagtatggcgaacccccgtctctactgaaaatacaaaaattagctgggcgtggcggtgcacacccgtaatcccagctactcaggaggctgaggcaggagaattgcttgaacctgggaggtggaggttgcagtgagctgagattgcgccactgcactcgtctgggcgacagagcaagactctatctcaaataaaaaaaaaaagacatatagaagaaagaataccatgtgacgatggaggcaacaattgaaatgatgcatctataagccaaggaacaccaaggatttctggcaaccaccagaagccaggaagagggaagaaaggattctttcccagagcctttggagataccatgctctgcagacaccttaatttcagacttctagcctccgctgtgagagaataaatttcggtgtttttgtttttttgagacagggcctcactgtgtcacccaggctgaaatgcagtggctcaatcacggctccctgcagcagcatcaacctccctggctcaggctcaagccatcctcccacttcagcctcctgagtagctgggtctacaggcacgtgccaccatgcccagctaatttttttttttttttttttttacagacgtgggtcttgctgtgttgtccaggctggtctcaaactcctgggctcaagccatccttctgccttggcctcccaaagtgctgggataacaggagtgagccaccgtgcatggccgatttctgttgttttttgtttttttgagacacagttttgctttttcatccaagctggagtgaggtggcgcaaacttggctcactgtagcctctgccccctgggttcaagtgattctcctgcctcagcctcccaagtagctgagactacaggcgcccaccaccatgtcttgctaatttttgtatttttagtagagatggggtttccccatgttggccaggctagtctcgaactcctgacctcaggtgacaggctggcctcggtctcccaaagtgctaggattacaggcgtgagccacctcggctgacctgatttctgttgttttaaatgctacccaggttgtggttatttgtatggcagccttagggaaacgaatactggaagcctgtggagaagacactggagcagatacgtatttcaaaacaccgggcttaacgttaaaactctcctctaggccccatctaggaatctaagtgggataagctaagatgagctagctgattcttcactggtggaaatttggacaattgacacgcattcattcaaactaaaaattaaagataaaaaaccacatttaataatttcactacagtgacaattcttgtaacattttgagactctatcagttagatccctacctctgttctattctttttgtggtagtgaagaactaatctttataactgtttttttttttttcagactcagttttgctcttattgcccaggttggagggcaatggcgcgatcttggccactgcaaccaccgcctcctgggttcaagtggttctcctgccttagcctcctgagtagctgggattataggcatgcaccaccatccccagctaattttttgtatttttagtagagatgagttttcaccatgttggccaggctggtctcaaactcccgacctcaggtaatccacccgcctcagccttccaaagtgctgggattacaggcgtgagccaccacacctggctttaattgttttttagccattttcacaaatgctagggaatagctcggtttagatactcggaactgtgtcactggccaagcctcatatggaattgctcatgtcttctagggctgtaggtgtggtcaacagcattttaaatttgatcttattggacatatgcctcagttttaccatatcatctgttatatggggataataatagtaactgcctcctaatgttgttgtgaggattaaatgagtttgtatttaccaagcatgtagaaaagtgcctggcacatagtaagtattaatcactgcactcctctctctcttgccatttgggaagtttctttctcactgaaccatgagctctccaaggataagaagcatgtctgtttcattttctatccccagcacctagtacccctctctggcacacagtaggccctcagcaagcatctgctgcctaaaaggcactatcaagcaggcagtatgaaattccatttctgagtcttgaagaaggaagtcaggtggaaaaacagataagagtcctacacataaacgtttaagcttgacaacactcaagaccatcaaggaagacagcatggagggaaaataaatagaacactgaggaaagattgatggcaggagatggaagcaaacagaaaaggagttctgaaacaatattctttcaaagaagccgtgaaaagagttcaagggaattgaagtaagtccacaggaaaggctgtcttaaaagtggagtatgaaaaatttgtggttagcaagcagctgactgaggttaatttttttttaagtctcagaggaaggaaatgatattgtgtaacagttttctctaacttggcaggcttttaaatgtgggtcccgatctgtcttgccagaagggttgagagctagggagcagggagaaggagggtatgggtctctccaagactctgtgtcttaagaaggttgtattgaagtcaggttatatcttcactcacaatatgagacaataaattcaaataaaacgtccatttttgtccccttattttgtttaggctggtaaagcaggtttgatgatgtttttgtcaggttgacaaaattatcagcaacaagtttttatctggaatatctccctcattacacttgaatttcaacagggttccaccacccaggaagacagaataaccggttttctgagtttttcctgatacaattctggttatcacaaacgacttgagatccctactcttctttaaaagggcaagaaaagggaatcaatatcaatatttgataatggcatttaaaaaataatagacatcacttttgcgtttaaaaaatgtttttcaatatttaatttacaagttgagtacaagccataaaaaatgtttttaaaataaatttgaggaattgaaaactcctaagtggtcaattgagcccacatgaatctaccaaacaagactgaaatgtactttcacaacatatggtctgatgaggtttttcctgttaaacagagaaaaatagacccggggaagttgctggaaggcatgaaccatgtaccatttaaagagaggttttccatacttatgcaaatgagaccccgttaaagactctactacaggatctaaagctagccgctccccagtctggggctcaaatgttctcatctgtaaaataagggaaaagagaaagggtggtatatgtgtctgcgtattaattatttgagtgtgtgtgtgaattctttggatatgaaaataaagagagaagacattaattatttgggtgcgtatgtgtgaattaattctttggatatgaaaataaagagagggccgggcgcggtggctcacacctgtaatcccagcactttgggaggccgaggcgggtggaggccaggaccagtctgggcaacatggcgaaaccccatctctacaaaaaatacaaaaatagccgggtggcgtggtgcgtgcctgtaatctcagctactagggaggctgaggcaggagaatcccctgaacccgggaggcggaggctgcagtgagccgagaacgcgccactgcattcccgcctgggaaacagaccatctaaaaaaaaaaaaaaaaaaaaaaaaaaaaggccgggcgtggtggctcacgcttgtaatcccaacactttgggaggccgaggcgggtggatcacgaggtcagaattcgagactcagcctggccaacatagtgaaaccccgtctctacttaaaaaaaaaaaaaatacaaaaattagccgggcatggtggtgcgtgcctgtagtcccagctacttgggaggctgaggcaggagaatcgcttgaacccgggaggtggaggttgcagtgggccgagatcacgccactgcactcctgcttgagcaacagaatgagacttcaaaaaaaaaaaaagaaagagaaaagacaacctaccccagtataaggggtaagaaaaaggattcagggaggctcaggaacttaaggcctcgagcacctgcacctccagccccacccgctaaccctccccagcgtggagatacagcacaggggccaacatggcgtcagcacgctgggtctcgcctgcgacccccgtgactccgcactgctgcagcccgggcgaggctgcgccccattggccaactgcaatgaggtcattgcgggggcgggggccggcggcggcgcaggggcggggctttacggacgcaagcacgtcgaagcgctgctcctggagccgcggagggtgcgggtttggctgcggtggtttctgtggcggttgctgtggcggagtttggaggtgagtgggggctgtaggtttagcgcaacagggagcggccctcgatggacgtaggaaatccttctaagagcccccttgattgtcagaggaattagcggggatctgacgtcttcgagataaaatgggggttcgccccctccttgggcacccctcctctgccctgaggaaccggaggctcactgccctttggaagccccgcatctcttccctgctttaaggggtaggcggaggaaccggaggttattggataggcagaagaatttagggggcttcttaaagggtttctcagtttgggggttttcctctccttttttcccatctcaaggtagatgagcctgagtccagagaattcctgctcattgggtagacaggaaatgaagcaggtgaataccgtgggaggaggcgaggaccggatgacaggagtgagattcttctaggcagggcgcgggggcgctgtagttggactcatcttttgcagaattgctgtttcttcatattttgttttgtgatcgtccagaactactttggcctaattagttttctgttagcctccattgctatagagatattcttgggagacctataatcattaaagagcaggaggacggaggcgactcgttggaggcttatcattatccacagctcctgaactatgctgaccaggcctaattttatgtgtttagaggttgtagaatctctctttgtttaagggtggtgccggtaacagctgatttggatgattcagatgtacagaatcttaaagtcagcctgcatattctcttgagaagtccttgcttatgtctgagcttgtgttactgtcttgaacatcacatgcacaaaggtttgttcgttcagatttctcaaaatgtctcccagccttccagaagagtaaatcttcctttgatgtcagactcatctatcagtactcagtatagatgcccttatgacactaaaaatactgtgcatttttctgagtttggatactggacaggctgtgccttacattagctgatcgagaataaataattgcagtttcaggaccactgatagcgccagttgtctcatacccggcaacagtaagacagcactaaaacgaaacctttattggctcatgagatttgacagatggaagaatgtaattaatcttgaaggtagggttgagaaacagaaagctgcagaggtggaaggcttattctctgtggcttgataaaactgctttgtcattatcagtgtgttcctgtcatgcttgatttgaaattgagcttaatatgcaaactggttgctttttccagatgacggttatttgtttgaattcctaagtggggaaatattgttttctgaggaatctggaagattaaaccctttagtgtagccatagctttaggatagtgccagaactttgggcttttagaaatgcgcattgtcagtagaagggagaaggatagttacaaggcagacatctttatgagagggtattgaaggcctcttctgtttgtttcctgcactagcaaaaacagattgagcagtgtgaaactcactgcctcaatattgtgtcctgggtatttaaagagttgtttgaggttcccagttcctgtctttaatctggatacattcttatcagttgagttgcccaaaataattgtcatttgatcctgatgttgactggaatggaagtgacttttcatctgacactctgtgggacagaattcaggaactgcctttgcaatttctcctttccatctttctagacagggtgtcaaaaacagttgttgacctgtcctcatggggtgttagaaatgtaaatgcaagagccgtagtggggtgtcatttgctcttagccctcgtggtaatttccaaagttatgtcattttctctttgcttcaggttggagagaaatccaggtactcactagactggtaccttctgccaccatgggggagcttttccggagtgaagaaatgacactggcccagctttttctacagtcagaggctgcttattgttgtgtcagtgaattaggagaacttggaaaggttcagtttcgtgacgtaagtagttgtggggctgcgacttgattactgctgaactctattgctatcgtggtcagatgccttatgatgaatgttttgttttttatttgcaaaaataacattatagcactgacttcctattggcagaatgcacattttgagttgtctttctaaaggtgagaatgttttgtgccaatctttacatgcttttgctagctcccactttcagaacagtcctaagcattctccaggtaattgtttgggatgcagggagaggttaccaaactaacctgatcaaggctttcacttgctaaatagcaaggtatttaaaaaaatatattgcagtttttccatatagtaggacattttaaaaaaaataaaatttgaggtatccagctacagatatatagtatataaataagcatatactgaatattcattattttggaatattatactgggcacttggagaagctatctaaagaatatggacaatctagcctgggtacagtggctcacgcctataatcctaacactttgggaggctgaggcgggcggatcgggaggtcaggagtttgagatcagtctggccaacatggtgaaaccccgactctactaaaaatacaaaaaaaattagcatggtggcgcaggcctgtaatcccagccactcgggaggccgaggcaggagaatcgcctgaacctgggaggcggaggttgcagtgagccgagattgtgtgattgcacgcagcctgggcgacagagcaagactccgtctcaaacaacaacaacaacaacaaaaaacttgtcatccttaatttgcagttcttcatctggtcctatgttgtccctctgcttaacatctattggctctattcagccttcttttcttttacttatgctgtacttcagtcatacaaaaaaaagagataggggccaggtgcaatggctcacacctgaaatgccagtactttgagaggccaaggcaggaggatcgcttgagcccaggagttggagaccagtctgggcaacatagggagatcccgtctctgccaaaaaaaaaaaaaaaaaaaaaaatgccggatgtggtggcacatggctgtggtcccagctgcttgggaagctaaggtgggaggatcgctgaagcccaggaggtcgaggctgtagtgagctgtgattatgccactgcactccagcctgggtgacagagcatgacactgtctcaaaaccaaaaaaaaaaaaagaggtggggggagtattataatgaccacctatgtttctactatctgcttaagagggaaacattccgtgtataattgaaacctctgtttctctttgctccatgccagtcctttcttccaccccagaggtaacccgtacagtgatttgttttgcttttatttctcctatgtgtggtttttgttgttgttgttgttgcttttctttttgagacagagtccactctgtcgcccaggctggagtgcagtggtgtgatctcagctcattgcagcctccgcctcccaggttcaagcaattctcctgcctcagcctcctgagtagctgggactaaaggcatgcaccaccatgcccagctaatttttgtatttttagtagagacggggtttcaccacattggccaggctggtctcgaacttctgacctctggtgatccacccgcctcggcctcccaaagtgctgggattacaggcatgagccaccatacctggccaacagatatttcagtttcttctagttctgttaatttttttttaataataaaatttataacattaagaaaaaaaatagagatgggggtctcgccatgttacccaggttggtcttgaactcctggactcaagcggttctcctgcctcagcctcccaaagtgctaggattaccggtgtgagccactgtgcctggctgaaatgtacacatcttaagagtacaatttgctgaattgataactttatacacctctgtaaccagcaccccaatcaggatatggaacttttttttttttttttttttttttggagacagaatcttgctctgtcgcccaggctggagtgtagtggtgcgatcttggctcactgcaacctccgtctcctgggttcaagcaatcctccctcagcctcctgagtagctgggactacaggcgcacaccgccgagcccggctaattttttttttctattttagtagagatggagtttcaccatgttgcccaggctggtctcgaactcctgacctcaggtgatccatcccccctcagcctcccaaagtgctaggattacagacgtgagccaccaggcccagactgaacattttcatcagtccagaaaagtatctgtgtctactgctagtcagttgctacccttcataggtaacctctgttttgattgctgtcatcataggattagttttccctgttcttgaattatatgtaaacgactcatacattgcaaactcatgtctgacttctttcactcagcctctgtttcttgcatgtatccgtagttcatttttaaaaattgccgaacggtaagtagttcattgtatgattacaccacagtgttttcatcctttcttttgtcattactcttttggggctattatgattaaagctgaagtaaacattatcataaaagtcttttttttagtttacaagttttgatttttcttaagcaaatacagttgatccttgaaaatgcaggggttaggggtgccaatctccccatgcagtcaaaaatctgcatacaattttgactcctccaaaacttaactattgatagcctgcttttgaccagaagccctaccaatttcataaacagtcgattaatacatattttgtatgttatatgtattgtacactgtattcttacaataaagtaagctagagaaaagaaaatactgttaagaaaatcataaggaagataaactgtatttactgaaagtggatcatcttgaaggtcttcatccttattgtctttatgttgaggaggctgaggaggaggaaggggaggggttggtcttactgtctcaggctggccgaggtggaggaaaatctgtgtgttagtggaccagcagagttcaaacccacattgttcaaaggtcaacagtaactgagtagtggaatgctcagtcatgggttgggtaggtgtatgtttaactttgtaagaaactgccaacagttttccacatcttttacttcctttttaatagcatttatcacaacaaattgtaataattggtttgtgtccgtctcttctgtagagctgaagactgggacgtagcttattattaatcttaattgctaataaaaatttttgccttagattcctctaatattaatatattgagttctcgaagagagaagtgttgaatacatggatatgtatgtgtgtgtttgtatttttttttttcttttttttgagactgagtctagttctgtcacccaggctggagtgcagtggcacgatctcggctcattgcaacctccgcctcccgggttcaagcaattcttctgcctcagccttccaagtagctgggattacaggtgcccgctgccactcccggctaatttttttgtattttcagtagagacggggtttcactgtgttggccgggctggtctcgaactcctgacctcatgaactgcccgccttggtctcccaaagtgctgggattacaagcgtgagccaccgtgcccggccaatgtgcttgtatgtttctatgtgtgtatgcatataatatatatacacacatacgtgattaagctaataaattgtgttgttcagcttttcaaagctaggacatagcttattctttgtattttccccagtgcctagttcagtatctgacacctatttggtgcttcataaatgttgagtaaatatagttctttatttgtgttaattttatggaatttatcacatactattttattggttgggttcatcttcttctctattagattgcaagctttttatttaatttaattaatttattattattattttttgagacagagtctcgctctgttgcccaggctggagtgcaatggcacgatcttggctcactgcaacctctccctcccaggttcaattgattcttgtgcctcagcctcctgagtagctgggattacaggcatgtaccatcatgcccggctaattttttgtatttttagttgagacagggtttcgccatgttgtccaggctggtctcaaactcctgagctcagataatcctcctgcctcagcttcccaaagtgctaggattataggcgtgagccaccgcatccggcctatttatttttttgagacaagagtctcactcttgtcacccaggctggagtgcagtggcatgattttggctcactgcaacctcagcttcccgggttcaagcgattcttctgccttggcctcccgagtagctgggattacagatgtacactaccatgcccggctaattttgtatttttagtagagatggagtttcgccatgttggccaggctggtcttgaactcctgacctcaggtgatccacccaccttggcctcccaaaatgctgggattacaagcgtgagccaccgtgaccggccagattgctagctttttagtgagtagttacttgttttgtttttatttgtatattccagaacatctgtcatattgctttgaaaattacttatggtgccagacgtggtggctcatgcctgcaatcccagcactttgggaggccgaggtgggtggatcacctgaggtcaggagtttgagaccatcctggccaacatggtgaaaccctgtctctactaaaaatgcaagaaaattagctgggcatggtggtgcgcacctgtaatcccagctactcaagaggctgaggcgggagaattgcttgaacctgggaggcagaggttgcagtgagccaagatcacgccactgcactccagcctggtgacagagcaagactctgtctcaaaaagaaaaaaagcaattacttgtggtgtatgaatgaataaactaaagcctgtcactgagaaggtgaaggccttgggacagaaaaacaagagaagttcctcttgtgcttggaaagaaagaaggaaaaccagagagagcttctgtgatattcattgcccaaattttaggtggtgggaaggaagctcactgagacttttgcctaggaagaacatttttgtaccgttgtgttttacctaatttgcctccattccagtaatgttgcagcaacgagggaggaagtttttatccttagctggtgtgactggccataaagcagtttttttggatcagtagacagttttgattagtgttgcatcatgcattgacagaaaattagtttttcgctttgcagaatgtgttgcttgagaaacagaagaaatagatacaatatttcaatgtttggtattgtgtttttatttttcagttaaatccagatgtgaatgttttccaacggaaatttgtgaatgaagttagaagatgtgaagaaatggatcgaaagcttcgtatgtgcactttggtcttgtgtaatgttcctttaatgaatcatttgtcttagattagtgacattagtcctcttaatagaggaagaaaatgttataagagaaaagggaaaaatcttgcagttaagatgccaaggtgtatttctcgtatacgagtagattttgtggtctttgggctaagtagtgcttaatggaaacctcgtttgaaataacatgctgcaaactgaaaactggttgtttttttgtgagattttaataacaaaactacatgatagaattttgagaaataggacccagcacaccatcagtttttgtcagcagagccaccttttaatttgagctatttaagagggaagaaactggctgggcccggtggctcacacctgtaatcccagcactttgggaggctgaggcgggtggatcacgaggtcaggagatcgagaccatcctggctaacatggtaaaaccccgtctctactaaaaatacaaaaaattagctgggcgtggtggcaggcgcctgtaatcccagctactggggaggctgaggctggagaatggcatggacccgggaggcagagcttgcagtgagctgagatcgcaccactgcactccagcctgggcgacagagcgagactccgtctcaaaaaaaaaaaaagggaggaaactaacatttatctaagttctcttgagggctaggttgctcatatacattactttattcattctccacaacattccttcaagatgggtattatcttatttaataattgaggaaactaaagattagagaggcttaatgacttgccctagatcataaacagttatgatggaatcagtatttgaagccaggttgctctctctggctcaaaagtccatgatcttgccactctactaagccagcttatggttagctgataagtgaatttggtccccactataaaaaacagttgtagttgttacctgaaacactcttctcttctggtattttgtgtccttattacctgttctgctttttcatttttgttttttatgcttaaaactgacctgattgttttcaaatttaatgaacccctttagatctagagttgtctcactagtgtgttaagtgtcaaatattctattgcattatactcttcttcataactctgctttgccaataatatctataagcagaactgtcatactttggagtggcattcgcgtatggaggagaggtgtggccttgaaggccagtgttaagacctgaagaaggaaagaaggcagttgtgggatgaccaccctttggagtaactttagagaatgtgaggaaggagaaagagggatggggagaaaaaaggtgcttctttcatattaaaagatattatatcttttatatatatatataaagtatcttttttgaataaaactttttgtaaccaggtcttagatgttaattcttttccttaaataatggcaattacgagcatgtgcagttagacatgaatgttttgattctgtcattttaggatttgttgagaaagagataagaaaagctaacattccgattatggacaccggtgaaaacccagaggttcccttcccccgggacatgattgacttagaggtaaacacttctgggaaaaccagaaaagtttctttctacttgaacgcagaaattactttcctgagcagatagagagtaaagtaattcttgctaactttgtcagcattatctactgattgtaagtttcttgtaggtgggattttgatagataatatttgtacacatttatggtgtacatgtgatattttggtatatacatagaatgtgtatataccaagtcagggtatttggagtatccatcaccttgagtatttaccatttctatgtgttgggaacatttcaattcttctcttctagctattttgaaatatatacagtacattgctgttaactataggcaccctactctgctattgagcattagaacttatgccttctatctaactgtatgtttgtccacattaaccaacctctcttcatccccccacaaacccacacacccttcatagcctctggtatctatcattccactccctacctctatgagatcaacttttttagctcccacatatgagtgaaaacttgtattatttgtctgtgccctgcttatttcgcttaacataatgacctccagttctatccatgttgctgcaaatgacatgattttattctttttttatggccagaccatatgaatcccctcttttatggtgacaaacagcactcaaacagtattatatgccactaagtaaatgtttattggtttatcgaaaccttattggagtaagttatctactattttattttattttattttatttttgagacatagctatcacctaggctggactacagtgaccccatcttggctcactgcaacccctgcctcccaggctcaagcagttctagtacctcagcctccagagtagctgagacgatagctgtgtgccaacatgcctggctaatttttttgtattttttgtagagatgggattttcccatgttggccagcttgatctcgaactcctaacctcaagcaatctgcctgcctcagcctcccaaagtactgggattacaggtgtgagctaccacacctggcctatctactagttggttaatcttgcaatcttgcagactaaatgggcagccagtagacttctcagtaattattttatccatctgaaatcgcctgagaaagttaccaagtatacaatagaatgtgtaaacaaagaaagactatttttttgacttctacaatgacttagaaaggaaagacttttttttttttttttttttttttccagacagagtcttgctctctcacccagcctggagtgcagtggtgcgatcttggctcactgcaacctccgcctcccgggttcaagccattctcctgcctcagcctcccaggtagctgggattacaggcatgcaccactgcacccagctaatttttttttgtatttttagtagagacggggtttcgccatgtttggccaggctggtcttgaactcctgacctcagatgagccacccacctcagactccctaagtgctgggattacaggagtgagtcaccatgcccggccaggaaagactatttatttatttatgagatggagttttgctcttgttgcccaggctgaagtacagtggtgtgatcttggcttactgcaacctccacctcccgggttcaagtgattctcctgcttcagcctcccaagtagctgggactacagtcatgcgccagcacgcccagctaattttgtatttttagtagagacgtggtttcaccattttggtcaggctggtctcgaactcctgacctcaagtgatccacccgcctcggcccaggagagattattttaagcaaaaaaatttccataaagaaaattgctctagtaaaatcacagtatttgctaggcaagtccaagttctctttgaactatcggcttggcaacagttctgtgggatgaattcatttaatgtctttcagagcaaacatattgagcttagcttaatatattttcttatttcatctaggccaattttgagaagattgaaaatgaactgaaggaaatcaacacaaaccaggaagctctgaagagaaacttcctggaactgaccgaattaaaatttatacttcgcaaaactcagcaattttttgatgaggtcagactattgtttcttttagtatttgagcagctgatattatactcacacaagtgggccatatttttattccagtaattattttaatttgctagtttggaagcaatgccatttttgcaccctgttttagttacagaaatgtgagattatgttccatttttcatgcagtacacaaccagccatggttttgcattttttcacattttcttcaatttttcatctcaatatgaggaaaagaaccctgaagtagttgtataaacatagttagtataaatttttacattatatttatacttataaggtaagtatatgcttaaggttaaagctgaggaagcaaacatttggttatagacaaaattataacaaaggtttaatcaccaaaccttttgtcatcaaatttttatttcattgtctatgtttgcttataaaccttcgagcacatttttcagtacttcagatagcacacatcacactaatttttcaagagtttttcattgtatttattgtatggaaaatattggtaggatgcttgtttgaaacttctggattatcacataaacttagacgcattacctcagagggaaaaatgttagtaaagttcttgggttaaatatgtaggtgaggccaggcatggtggctcatgcgtgtagtccctgcactttgggaggccgaggcaggtggatcacctgaggtcaggagttcgagatcagcctggccaacatggtgaaacccggtctctactaaaaatacaaaaactagccgggtgaggtggtggttgcctgtaatcccagctactcgagaggctgaggcaggaaaatcatttgaacctgggaggtggacgttgcattgagctgagattgctccactgcactccagcctgggcgacagagtgagactctatctcaaaaaaaaaaaatgtaggctgggcgcggtggctcatgcctgtaatcccagcactttgggagtccgaggtgggcggatcacgaggtcaggagatcaagaccatcttggctaacacggtgaaaccccgtctctgctaaaaaaatacaaaaaattagccgggcatggtggtgggcacctgtagtcccagctaatcaggaggctgaggcaggagaatggcgtgaacccgggaggcggagcttatagtgagccgagatcgcgccactgcactccagcctgggcgacagagcaagactctgtctcaaaaaaaaaaaaaaaaaatgtaggtgacttggttgggcatggtggctcacacctgtaatcccagtactttgggagggtgaagtgggcagatcacttgagcccaggagttcaggatcagcctgggcaacatggtgaaaccccgtctccacaaaaaatacaaaaattagacaggcatcgtggtgcacacctgtagttccagctactcgggaggctgaagtgaggggattgcttgagcccaggaggcagaggttgcagtgagcggagattaagccactttactccagcctgggggacagagcaagactgtctcaaaaaaaaaatgtaggtgacttagtccaggtgacaatgtgctgaggtgactccatggaaaggatctggagcaaggcttccagaatgctcccttctcctaactcagtctggggaggagtcttagctttcaacttggatgtggtttttctgatggcctaaagtacagtaactgtcttcttgacaggtgtctttgccaccagattgacaatattagacactttagggattgttacagtcactgttcaatgtgccttcccataaagttctttcattcctttgctcaacaagaaaacttggcaaagcttttaaatatagaggccctttttttttttttttttcccgagacaaagtctcactgtgttgcccaggctggagtgcagtggagtaatcttagctcactgcaacctccacctcccaagctcaagcaattctcctgcctcagcctcccgagtagctgggattacaggtgctcaccaccacccccagctaatttttgtattttcagtagagacagcgtttcaccatgttggccaggctggtctcgaacctctagcctcaagtgatccatccacctctgtctcccaaagtgctgggattacaggtgtgagccactgtgcctggtagagtcccattttagttagcatctgctgtgttctcagttgtactttaaatttatatatatagtttttatttttattttttattgtttttaggccgggcgcggtggctaacgcctataatcccagcactttgggaggccgaggcagggggatcacgaggtcaggagttcaagaccagcctgaccaacatggtgaaaccccgtcttctactaaaaatacaaaaattagccaggcatggtggcgggcgcctataatcccagctattcatgaggctgaggcaggagaatcgcttgaaccggggaggcggaggttgtagtgagctgagatcgcaccactgcactctagcctgggcgaaagagcgagactccatctcaaaaaaaaaaattgtttttaactgcctcatctcagaaatttttctcttttgaggggagatcaaatatccagaattctctagactggagcaggggtttttcaaacaacagcagcagactcacctgtaatcttgtcagaagtatgaattatcagtctccaccctagacttactgaatcagacactgtgggagttaggcctagcagtctgtatttactaggtgatccggaggcatgctagtttgaaaactgctgggctagagaaggtctgctgaggatgtgatacattcctcactaatttaaggatttgactcagaagccatttaattaaaaggatctgctgggtcaagggaaaggggaaaaactcatatgaatttaattgcctggtcctttcaagagtcagaaggtacaaatatttatttagtttgctcacagagtcgagaattttgagactagtggtaacttctttcgccagtccctaatgacatcacgttagagggtgtgggacagtgtgattaactctaagtgtttaaggtcttttgcaataggcatcgccacttaagctgtatgtttttaatgaacctggaattccagcatgctcactgcccagacgttattgtatttttgttcactaattcactgagcatataatgagcacctacttattgtgagacacaagatgagtaagacatggtccctgtgtttaaggaatgtatcattcagtcttaagaaataccccagaacatgacgctttcatatgctcacagatgtgtgcttttctaaacatatccaagctgctacccacagatctgatgtaaacctggccttgtagtcagagctcagctaccttttagcattatttggagcttaattcttttaccttccctgtccccatttttttcccttttgatatactgtttagtttactgctgagatattgctatctcatatgaaaatgtctttcaagacctcgtaagtttaagaatgagagccagcttcctattatggttcatttttggagaaattccgaataaagactgatagatggattcccttaagggaaataattatttaaactattaattttctaatgaaaagaacttagtaaaaatgaaaataagaggaaccacttggaaaaatgatattttaaaatcataatttatggatttaggacttttattttgtgaataataagtctaaacactaaatgcctgttttgagaaggcagactctaagtcttcatgatctttgtgcccttttcatgctggggttgttttccctctcctattttttttttttttgagacagagtctcgctttgtcatccaggctggagtgcagtggtgcgatcttggctcactgcaactgccgcctcccgggttcaagcgattctcctgcctcagcctcccgagcagctgtgactataggtgtgtaccaccatgcccagctaatttttgtagttttagtagagacgggcgtttcaccatattggccaggctggtctcgaactctgacctcgtgatctagctgcctcagcctcccaaagtgctggaattacaggtgtgagccaccgcacccagcctccccctcctattttattcaaaactttttttttttttccagtctctggaagtacttagagcacaagaccgtggctatgagaggttcttatgctgcttttgtcatcaattccccttccattcccagcagtctcactgcattgcaagtctcctggcaagaacctctctgccttgcctgttcttgcactagctcacagcctcagccaggttcctttccatagaccttgccctgctgctgcgtagcagcaggctcaggtgtcactgccacaactttgcatctgcacatgcgcgtgcacttcaaataatgcgaaagataggacacttgggaccctcaaatgttggaaacttaggatttttaatgagattttcttctgtgtctgaaattataatatttgcaaagggcctaaaacactaccagttttaaaccccttattttgtgtaatttggtgactataatcaataattcacagtaatgagttagcagaaatggctaaatcagaaaatgattctatatttaggcataggagttatgattggcagggtgtgtgtaaggtgaaaaataaacatattgaatagtcttatgattaaagatgattacaaatttgacttagtcatttcttatctagggcatttaaaatgacttgttaatgattatccttttctaagtcttcttgcttatgaagaactgtaagagctggagagatttctctgcatcttttaccataagcaccataacatatgagaacataaagaagactggaaaagtaatggttaatggcatgcagattccctgctttcctttccttctcagttttccatccatctgctttctttatttttttcccatctgccatttcctttggggcctaggtgaataccttaagtaatgaaatataatttttttctcgatgtagatggcagtaattgtttgttcttggtaattgacatagcttgaactggatgtgctatttatacttaattgctgtagaaacagaactgaagttcttctacttcctttttgtaaggcgtggttttcagtatctgaatggagaaaccagagggcatagcagtaatgtagaggcatattcacaatgttgttattagagaacccagatacccttaagacaagcttgtccagcccatggccttcaggcctcaggacagctttgaatgtggcccaacacaaattcgtaaactttctcaaaacattatgagatttttttggaatttttttttttagctcattagttatcattatagtgtattttatgtgtggcccaagacagttcttcttccaatgtggcccagggaagccaaaagatcagacacccctgctctaagatttagatactttcaaccacatggttttagatactgctttaaaggccttcagttagtgagtggttctagtcatcctagtttctcaccaggcacaattttacttaaaaatttgtaacttttctctctaagatagaattcttaagtatgaagtggtgaaattagcaattcaaatattatcgcaagtttctgttgaattttaattttgttgttttttattctcagagagtcctagatagagtctttgaagtggtctagttgctaagtactgtttgcttttccatcagttagagcacatgtgtttgcattgagtccgatatttagggttgacttaaaccacgtcttgtgagacaggcaggcaagtaggatggagtcttgtgagtagtcaggctcactggtttttgccaagggataaaccaagaacaagttgaaatgttgtaatcatcgggatcctgaaaacaagttgcttgtagtcagctgatttgattgcaagtagaaaccgaaagaaccccctcaacttacatgtaacagccagtggtaactagtgtctccatgatctcatcttaaacttttccaatctcatgacagtatttctctgcacttctggtgttgatccttacttcccaaaatgattgctttctattttttaggccttcagacttatcatctggtttatacacagtttttccccctttttgctatgtttatgatcccatgactttatcaagttatggtccctgtgccactttttaagagtgtggctgacaggggtagaatcaaattgaaatttggaatgaaaatgatagagaaaaactcttctgattttttgtcttattgtgcttttgaagaggatgattgttctggtttactcctagtttttggtcaaacaagtattgcctgggtattagagttggggagatgaggcaatggagaagttgattggactggtttttgttttgttttgttttgttttgttttttggagcagcttctcctttctgatgggagtaaagggtggtaggatgagttcggtagagagaggctaggaaatgtagacctgcgtgtgggaagatccttcttcatttcattgtataaactgtcatggtggaagtcattttaaatcttaccaattaaaccagcccatgaactctagtttggtttattatctgttgtttttccttcactttacttgattcttgagctgtgttctcaagaatcctacaactgtaaagcctatgtgaacttatttagaagattcctagtcagaaaatgggacattcagatatgtttttacaggcctgcccagctattgtgcttcttatccttttgaagacataaatactctttaaatcccatggcttggatcattctataagtggccatgctgaaagttctcatattctgaattttaaaggggctggaaacgtagatacctggagcttccccttctgtctttctccagacttcacagcattcaaagacagtggcagtgccttgcttcttccttggaaagagagcctctatctttcacattctcacgtagggaaaattctagtttgtagctgcctagaaattaaatgttcagagtatctgcagagtctcttcattattgcacagaaagaagagatattttagcttcctatctacatgcagaggtatttcctggcactttcatcattcattcagggaaacgtaggagagaaaatggcttccaccaagtaacagatttatacatgtcaccatcacttaattttttttccttttgctccttatttctaaaaccatttccccagatgctttactggggcaattatgctttctttacctcaaatttattttctgtgttttcatcccctattcttcttgtctttttatggatatatcttgtcttttcgtggtttgttttctttttcatccttattttctgaacctgtctcctggttcctcgttgcctgcatgccactaactattttcattagatattaattgatttgtgaattcaggctgaattgcatcatcagcagatggcggatccagacttgttggaagagtcctcatccctcttggagccaagtgagatgggaagaggcactcctttaagacttgggtaagtgccatgtcaacttttcggtattcagtggggccatgttcatctcttctgttcagaagagcagtgagactggggattcacttgctaccaggatatgccctcttctgagcctattgagatagtcctacaactctggattcatgcctgagttgctctgtcagctctctgctgggtccataagtgaagctgggaataagacttgtattaaaccaacccaaatgtccatcaatgatagactggattaagaaagtgtggcacatatacacaatggaatactatgtagccataaaaaatgatgagttcctgtcctttgtagggacatggatgaagctggaaaccatcattctcagcaaactatcacaaggacaaaaaaccaaacaccacatgttctcactcataggtggaaattgaacaatgagaacacttggacacaggaaggggaacatcacacaccggggcctgttgtggggtggggggaggggggagggagagcattaggagatatacctaatgtaaatgacgagttaatgggtgcagcacaccaacatggcacatgtatacatatgtaatgaacctgcacgttgtgcacatgtaccctagaacttaaagtataataaaaaaagatatatatataaatataaataaaaaagacttgtattaaaaccttccatcccatgacatggaatagagtttccaatctgcctcttctccccacagcttcgtggctggtgtcattaaccgggagcgcatccctacttttgagcgcatgctttggcgggtatgccggggaaatgtgttcctgcgacaggctgaaatcgagaaccccctggaggatcctgtgactgtaagacaaggagattgcatcctgtggagtaggtcttgtaaagggagcccagagcagtaacgtagcatggggccacctgaatccagtgcttccacagaggagccattatctttatctctgctctaattggagaatttgaagtacttcctcttagttaattcctgtcatatatacatatggatgtatgatgtatacatgacatatacatattttcaagtttacccgtgtagatgttattctgattggaaatttttattttcactcatttgccttttatgaaaattaactttaaagcaagacatctggttccaaatttggtaatttttttttttttgaggtggagtctcactctgttgtccaggctagagtgcagtggcgcgatctcggctcaccacaacctccgcttcctgggttcaagcgattctcctgcctcagcctcccgagtagctggggattacaggcatgtgccatgatgcctggctaattttttctgtattttcagtacagacagtgttttaccatgttgcctaggctggtcttgaacttctgatctcaagtgatctgcctgcctcggcctcccaaagtgttgggattataggcataagccaccatgcccagccccaagtttggtaatattcatgtataaaaagagaaggagagatttcctagactgtgatcttaataagctgatgaaattttacttggtaaagtttttttgtttgtttgttggaaggattagaaacttagtttaagaatagatatcgcacaaaataggatgatcttccccacccagtacttcaggaagtagaaacagtttaacatcctggcatttgccataatgggacagagtttatcgtctaaacctgcatttaggtatggtgagtcctgatttcagggagtaccagtgaagataaatgtactgcaaaaattttgctttgcttttgtactagtattatttagaaacctaaagttagcttttctgttctaaattatcttgtgaatttcttaaattcgtgttctttacctaaaaagagagagattgaattgtgagatttctcagattgggtgggctgtgcagctgcaggtctttcatcctccatgccgtggaggagtgtggttacacttcaggtgaaccccctgcctaggggtgtagtttcacaatcttgccaaaggccatcaggttgtggaaacgttgtaatttgtagtcacattaatgaggaacttttctcaggaatattcagtcaagtttcctcttggcaacagaaaggttattttatcaacaaatccagaaatggggaccctggatatctgtaacagagcaggctgcacaaagaatgggttctagtttagcctacagaatttagggatttcagacccttgagcccaattttcttcactcctcatccccttttatccttctaaagttttgtttgttattataaaagctctacatgctgtgtatgactatgagaaaatacaggcaacctgagacaatcctggttaacacaccatacacctttttttctgatctttccttccagtccttgcatcatacttcaggtataaatttggtatttggaatggattaccttcctccctgccccataaagtccagattagcttgaattgtgagattctatatcagcattctttccagggactcagttccttgtagttattcagccccttttatctaagaatttctaagtcccagaacaggcagaaatggcttccttctcttttctctcctatactttcatcattcaggcaatataagatttaaagctgaattggtaaataagtctaaacagtgctaagaggagcatcatcttagcttcaagctcctggttgagtcaaaaaaacaaatagagaaagatttttgtgaattagagattatagggcagatgttcttgtagtgaagcttaggaaatggagtgagggcagtggttaaaatgcaggactgccatgtccttaaaagatgcctgttgttcttgcatcaccaaaaaagtgggttatttaagagattttcatccagatacagaagtctgaactcttgtttttttattctggggcctagggcgactacgtgcacaagtctgtgtttatcattttcttccaaggcgatcagctgaaaaacagagtcaagaaaatctgtgaagggtaagagaggcatgcctctaccaggagtgcacagccatgctgcccaactgttgagtcttaaagttcacaatagtgaaatacaaatcctttttagtctacctcaacacagttaattttaataatgttaggggctattttaatcaattagaaatagcctgcattcatttttatttttatttttgttgttcagatgggggggtctcactctgttgcccaggctggagtgcagtggcatgatcacggctcacggcagccttgactgcctgggctcaggggattctcctgcctcagcctctagggtagctgggactacaggcgtgtgccaccatacctggctaattttttgtattctttgtagagacggggttttgccatgttgcccaggctggcctggaactcctggactcaagggatctgcccatctcaacctcccaaagtgctgggattagaggcgtgagccactaaattctttttctcttttttttttttttctgaccgagtctccctccacgcccaggctggagtacgatggtgcgatcttggagcactgcaacttctgcctcccaggttcaagtgattctccagccacccgagtagttgggattacaggtacctgccaccacacctggctaatttttttttttgtatttttagtagagatggggtttcgccatgttggccaggctggtcttgaactcctgacctcaggtgatccacccacttcagcctcccaaaatgctgagattacaggtgtgaaccactgtgcctggccctaaattcattttaaaaaataccatcagaaccacagttgtggccagatacaatggctcatgcctgtaatcccaacactttgggaggccaaggcaggaggattgcttgaccccaggatttgaagaccagcctggccaacttagtgagaccccatgtctataaaaaactaaaaactgaaaaaaaaggaccataatttccttaacttggggaaaaataactcttaaggactcatggtttataaatgccatattattctgggacagtgagtctccatacttagcatagatgctatgtccttaaattttctgaaattctgccttagggacagatcttttttttgagacagagtcttgcgctgccacccaggctggagtgcagtggcacaatcacagctcactgcaaccttcacctccagggttccagcgattctcctgcctcagcctcccgagtagctgggactgcagatgcgtgccagcacacccggctaatttttgtatttttagtagagatggggttttgccgtgttggccaggctgatctcgaactcctaatctcaagcaatctgcccgcctcagctctcaaagtactggtattacaggtgtaagccactgtgcctggccttttttttgttttgtttttgttttgaggcagggtctcactctgttgcccaggctaaagtgcagtggcatgatcacagctcactgcagccttgacttcctgagctcagttgattctcccaccgcagccccatgagtaactgggactacaggcatgtgccaccatgcccgactaatttttgtattttttgtggagatgaggtttcaccatgttgctcaggctggtcttaaactcctagactcaagcaatccacctgcctcagcctcccaaagtgctgggattacaggcgtgagccactgcacctggtctaggggcagaattttttccatgccatcttactccgttaatttacaatataatttgctttactttttttttttaatcacaaaggaatttcatagctacagagaatgtcaagatagttcggatgctataattgctccgtctgcaggtcattttacgtaagtgttgacttaggctgggcatgatggctcatgcctgtaatctcagcactttgggaggccgaggtgggtggatcgcctaaggtcaggagttcgagatcagcctggccaacatggtgaaaccctgtctctagtaaaaatacaaaaattagccaggtgtggtggcaggcgcctataatcccaggtacttggaaggctgaggcagaagaatcacttgaacccaggggcagaggttgcagtgagctgagatcgtgccacttcactccagcctgggtgacagagtgaaactctgtctcaaaaaaaaaaaaaaaaaaaaagtgttgacttaatacatcggtctgacctaatcctgttttggtccttctggtacattaggattactttctgagattatttaaattagataagttaagaaacttcgatgttcttatattccaggttccgagcctcactctatccctgtcctgagacaccacaggagaggaaggaaatggcttctggagtgaataccaggattgatgatctccaaatggtatgcagaaggctggagggaatttgtttttgtgaaatactggaatacgagaccattatccttccttgaaatgctgatattctataaggtacctgtagcaaaccaggataccaaaaaaagaaatgtacatgggtaatatgtccttctgggagctgagaaagtatcagggaatgatggttaaaaatagcattagccatcctcaaacgagacaggaatgtaaagcatctagaatcgttgttgcctagcatattcaattcctctccacctcatgggtctgagattttttttttttttgagacagagtctcactctgtcacccaggctggaatgccatggcgctgtctcagctcactgcaacctccgcctcctaggcgcaagtgatgctcctgcctcagcctcctgagtagctgggattacaggcatgtgccaccatgcccgactaatttttgtatttttatttatttttttgagatggagtcttgctcttttgcccagggtggagtgcagtggtgtgatcttggctcactgcaacctctgcctcacaggttcaagcgattctcctgcctcatcctcccaagtagctgggatgacaagcatgtgccactaaacctggctaatttttgtatttttagtagagacagggtttcaccatgttggccaggctggtctcaaacgcctgacctcaagtgatcctcccaccttggcctcccaaagtgctgggattacaagtgtgaatcactgtgcctggcctaatttttgtatttttagtagagatggggttttaccatattggccaggctggtcttgaactcctgacctcaagtgatccacctgcctcagcctcccaaggtgctgggattataggcgtgagccactgcgcccagccaagtctgagatagttttttttgttttttgttttttgttttgtttgttcgtttgtttgtttttgagacggagtctctgtcacccaggctggagtgcagtggcgcgatctcggctcactgcaagctccacctcccgggttcacgccattctcctgcctcagcctctcgagtagctgggactacaggggcccgccacacgcccggctaattttttgtattttttagtagagacagggtttcaccgtgttagccaggatgatctcgatctcctgaccgtgtgatctgcctgcctcggtctcccaaagtactgggattataggtgtgagccaccgcgcccggctgatagtttttatgataataattttttaaaagtatgcttagttaagacaaatatatatcaaacaatctaaaaatacatgagtagtcagttctgccttctcccacacaccctcctgaggcagctggtcccaatagctcggcatgcatccttgcggtcacctttgatcttaaccacacagactagccaaaaagctctggtgtgacttttgtacccaagaagagactgtgttggagttttgccaaattgcagtaagtgtggtttatgcacaccacggttatcacagggctctgagggaggagttgtgaactgtgtgtacatggaaggaaaggctggtgagtggggctttgttccctttgaaagaatgaaagtgatgattgcccccttagaatattaataaacatacttaatcccaaaggcagttccttttggcagtggcagaattgtcaggaattgtcaggggtatgttgtaacttccatttcttttttcttttcttttctttttttttttttttgagacagagtcttgctctgtctctcaggctagagtgcagtggcgcgatctcggctcactgcaacctctgcctcacagattcaagcaattctcctgcctcagcctcctgagtagctgtgattacagatgcctgccaccatacctggctaatttttgtatttttagtagagatggggttttgccatgttggccaggctggtcttgaactcctgacctcagatgatctgcctgcctcggcctcccaaagtcctgggattacaggtatgagccaccgtgcccagcctgtaacttccattttaactctcagtgacctccatcatatatgacccaccaacctgacctattgctggctcctttgagatacacttaacctgtttaagcagagagagagagttttagaactgctggtgagtgataggctatattagtatattctgggttctaaggctgtcttaatctccttccagacctatgggtagatttaaagagcatatgtggtagtcattataactgaccagaatttgattttttaaaaatctagctgtaggaactgaaagtttaaaaagggattgaataccaaggaatgggatgaggaaagagaacggcaaatagaacattgcttgctagtttctttagcatccttctagaagaagggttttttgtgttttgtttgtttgttttgttttgttttgttttgttttgttttaaagacagatctcactctgtcacccaggctggaatgcagtggcacaatcttggctcactgcagccttgaccgactaggctcaaacaatctgtctcagcctcccaagtagctgggactacaggtgcctgctgccatgcccagctaattattttttggtatgtttttgtagagatagggtctcactatgttgcccaaactggtctggaactcttgacctcaaacaatcctcctgccttggcctcccaaagtgctgggattacaggagtgagtaatagtaattgtgaaatagtccacaaccagaaggaaagaaagtagctatcttcaagtgatgtgtttcctagcatgacatggctttgcttttaaaaacaaagcaaaacaaaacaaaggaagtcaccttcctctgcccaagacaatttttcagggagtagttactgctttgttctgaactaacttgaagaattgtctatgatggagacttgtgctttgggttgcttgcctaatttcttccagttggaagcaacaggcttagccacacctgctattaaaaacttaaatatgggctggacatgttggctcatgcctgtaatcccaacactttgggaggccgaggtgggtggatcacgatgtcaggagttcgagaccagcctgaccaacatggtgaaaccccgtctctactaaaaatataaaaattagccgtgcatggtggcgcgcgcctgtaatcccagctactcaggaggctgaggcgggagaatcgtttgaacccgggaggtggaggttgtggtgagctgagaccacgccactgcactccagcctgggccacagagcgagactccatctcaaaaaaaaaaaattaaatatttggtattaagccagtggaatgtaaaatgttcctgtaccttcctcccaccttagtcttggcactgtaattcctctgagggaaatctgtactgatttcaaaaggatcaacactgaaccattttttcctctgatgagaagcctgacataaaggtaacaccttagctgccctcatgatggcagtggtatgtggcagtccaagccccctgtaaagatcacaggtgctcctgatcccatggcgtctcctggcccatgttcccagtgtaggctggtggtggtattcagcactgcctctttccaccctctcctgatgctggcccatgtgcaaaggattctgtgtggatttgttaatttgtcagctcctgggcttgtgatgcctactgagttacattccccacatagaaagtcgttgctctttaataagccaagttaaaggcagtgacctacatttgttgtgccttggattggtggtaagattgaacatatatagaaaagctaaactattttctcaggtttctttttaggttgaagctaaataaaagtgaatgttagtaactagaactctaatttcttgtaatttggaaaaaagaaaccattctagccagaggaagaaaaagacaattccctggcaactcttttcagaaagctatgcctctttgccattcataccctgagatctaaaactggtgttaaaaggatccctcgcttgttccttttctccccaaaggttctgaatcaaacggaggatcaccgccagagggttctgcaggcagctgctaagaacatccgtgtctggttcatcaaagtgcggaagatgaaggccatctatcacaccctgaacctgtgcaacatagatgtgactcagaaatgcttgattgcagaggtctggtgccctgtcaccgaccttgactccatccagtttgcactcagaaggggcacggtgagtccccaaagctaacaatgcagctcgtggcccggaagagaggttcccatcaatagtaacattaatgtcatttttggccgggcgcggtggctcatgcctgtaatcccagaactttgggaggccgaggcgggcagatcatgaggtcaagagatcgagaccatcctggctaacacggtgaaaccccgtctctactaaaaaatacaaaaaattagccgggcgtgttggcaggcgcctgtagtcccagctactctggagactgaggcagaagaatcaagtgaacctgggaggcggagcttgcagtgagctgagattgcgccactgcattccagcctgggcaacagagcgagactctgtctcaaaaaaaaaaaataataataaaaaataaataaatagtaacattaatgtcatttttatggcatttcaccttcagagttcttcaatatatttatttgtcttttaacttgacagcacatttcatacatagcctggcatataatatgtatatcatagcgtagcatagcatatctttattttgcatatgtggagactgcagttcagagagctgaaataatttggtcatatgcccatgattcttcagggttgttcatggccagggcatcagtttcctgatgccctctctgtatatgactgtttctgtttagtagttaattagaacaactactctgtccacagaagtgctgtaagtgcctggaggagtacagagatgtataaaacatgccctcgagtatcttacagtttattaggagagttccaactatggagttggaaaaagctttaagcaggtggcatttgatcaggtctttgaagaatgataagttgttggtaagactgctgaatgaagagaagaaaacaaaggcaggaagtatggttagaccatgtatgtttggacaagaacaggatttacagtgggttagctgaagagaagtacctgtctgcatcaggtagtttggaacttaattgtgaaaggttcttaaataatagcttagaagatttaaattttattccagaggaagttgagagacattggaagttctttaggggtaaaggaacatgatcaaagcagtttgggtggttttttacatttttaattttgtgtttgagacaagatcttgctctgttacccaggctggagtgcagtggtgccatctcagctcacttcagcttccaactcctgggcttaagcaatcctcccacttcagactcccggtagctgggactacaggtgcccaccatcatgcgtggctaattttttgtagagacagggttttgccatgttgcccaggctgatctcaaattcctgggctcgagtgatctgccttccttggccttccaaagtgttggggccaggcgtggtgactcactcttgtaatccagcactttgggaggttgaggcgggtcatcacttgaggtcaggagtttgagaccagcctggccaacatgacaaaaccccgtctctactaaaaatacaaaaaagttagccaggtatggtggtgggtgcctgtgatcccagctactcaggaggctgaggcaggagaaccacttgaacccaggaggcagaggttgcagtgagctgagatcatgccactgcactccagcctggacagcagagtgagactctgtctcaaaaaaaaaaaaaaagtgggtcaccacgcctggtggatcaaagcagtttttttgttttttggtttttttttttttgagatggagttttgctcttgttgcccaggctggagtgcagtggcatgatctcggctcactgcaacctccaccctccacctccctgcttcaagtgattctcctgcctcagcctcctgagtagctgggattacaggtgtgcgccaccacacccagctaattttttgtatttttagtggagacggggtttcatcacgttgaccaagctggtgtcgaactcctgacctcaggtgatccacccgcctcagcctcccaaagtgcagggattacaggcatgagccacttctcctggctcaaagcagttttaaaagagtaatctgctgatagtatctaggttggattgaggagtgaagagattctgtaggtaggggttcagttaggaggttattgtagacatagagtagtaaatgataaggatccccaggtaggacttgacaatgggaaaaaaaatgatgaattgtgagatgttctgcaggaaaaatcaatagggctacctggttcctagcaaggtgcaggagaaatacaaggagaaagatttaaacatctttttgaggcatcaaagctgactggccaggagaattagggttccaatgagggaagtaaatgttcagccagagaagcttattgattggggagagatggtaagttcagttccgggcacattgaggtctatgtggaaatgtcaagcagacaagggaacaaagctaaggaaatgggagtcatgagaatggaagggaatgagacctccaagagggaggtcatagagagaaaaaaaaggttggggtcttgcaatgctatgagataggcagagcagaaataaccagcaaagatagaaaagcaatggtcagcgagcaggaggagaactcctaaggaagaaggattttcaccaaagatctccaatgtcaggggcgtgcatgggggagagaagctctttggtcaggagccagtcactttgcctaagcatgctcagccagactgcaagggatcaggaagttaagagaaggtagtgaagaaggagagccagagaacatactttgctttctccatgaaagggggagaacaactttcataaaaaggcagatatggaggcagttccacattttctttggtgacatattttaaagttaaatttttttcacattaaggatgtatttcagaggatctaatagaaatcttccattataaatgttataccttttcccagttttcccaaaagctgggaaagataatctagttttatttttaggtttattagttttattgagatataatttacatgaaagaaaatacatacattttatgtgtaccatttgatgagtttcaagaaatgtacacctgtgtaaccactaccacaattaggaggataacctaagtttgataaatgtgctaatgtttttcaggaacacagtggttccactgtaccttccattttgaacaggatgcagacaaaccagactcccccaacctataacaaaaccaacaagtttacctatggctttcagaacatagtagatgcttatggaattggaacttaccgagagataaatccaggtaaaaaaaagcttgttatctttttcctctagagttttttttgtttgtttggttggtttggtttgttttgagacagagtctccctctgtcacccaggctggagtgcagcagcacgactgtagttcactgcagcctcaaactcctggcctcaagagatcctcccaactcagtctcctgtatagctaggaccacaggcgcacagcaccacacctggctaattttttattttatgatttttttttgactgggtctcattctgttgcctaggctgtagtgcaatggtgaaatcacggcttacagcagcctcaacctcgtgggctcaagtgattctcccgcctgaacctctggagtagctgggactacaggcatgtgtcaccatgcctggctaatttttaaaatttttttagagatgggttttgctatgttgcccaggctgataatttttaattttttttagagacggggtcttgttatgttgcccaagctagtcttggactcctgggctcaaggaagcctcctgcttcagcctcccaaagtgctgggattacaggtgtgacccactatgcctggcctttttgttcattgtttcttctaatgcctcactttaaatgctgttgaataactgaattaaaattaaagatgttaatcctagcactgtttttttaatttaattttatttttaattttttttgagacggagtctcgctgtgtcacccatgctggagtgcagtggcgtgatcttggctcaccgcaagctctgcctcccaggttcacgccattcttctgcctcagcctcccgaatagctgggactacaggcacccgccaccatgcccggctaattttttttttattttttttaggtgagacagagatttactctcgttgcccaggctggagtgcaatggcacgatctcagctcaccacatcctctgcctcccaggttcaagcgattctcctgcctcagcctcccgagtagctgggattataggcatgtgccatcacgcccggctaattttgtatttttagtcgagacggggtttcaccatgttgcccaggctgatctctaactcctgacttcaggtgatctgcctgcctctgcctccccaagtgctgggattacagacgtgagccactgcgcccggccatttttttgtatttttagtagagacagggtttcactgtgttagccaggatggtctcgatctcctgacctcatgatccacccgccttggcctcccaaagtgctgggattacaaagtgctgggtggcgtgagccactgcgcccagccaatcctagcacttttagaggccgaggtaggaggattgcttaagcccaggatttcaagatcagcctgggcaacatagtgagaccccatctctattaaaaaataaataaacatgttgacacctcagatcttgtgtactccctgtgaagaggtgctcattctggcagggcatggtggctcacgcctgtaatcccagcactttgggaggctgaggcatgtggatcacatgaggtcaggagtttgagaccagcctggccaacatggtgaaaccctgcctctactaaaaatacaaaaattagccggatttggtggcatgcacctgtagtcccagctactcgggaggctgaggcctgagaatcacttgaacccaggaggcaaaggttgcagtgaaccgacatcatgccactgcactccagcttgggcaacaacaaaaagatgcccatttaatgtaaggggcaggtttactgtcaggtagcgttcctttaagagttcatcggctgggccaggtgtggtggctcacgcctgtaatcccagcactttgggaggccgaggcaggtggatcacctgaggtcaggagttcgagaccagcctgaccaacatggagaaaccccgtctctactaaaaatacaaaatcagccaggcatggtggctcttgcctgtaatctcagcgactcgggaggctgaggcaggagaatcacttgaaccggggagacggaggttgccgtgagccgatattgcattattgcactccagcctgggcaaaaagagtgaaactctgtctcaaaaaaaaaaaaaaaaaaaagttcatcggctgggcgtggtggttcatgcctgtaatcccagcactttgtggggacaaggtggaaggatcacttaaggtcaggagttcgagaccagcctggccaacatggtgaaaccctatctctactaaaaatacaagaaaattagccaggcctggtggtgcatgcctgtaatcccagctactcaggaggcctagacaggagaattgcttgaacccaagagacagaagttatagtgagcctaaattgtgccactgcactccagcctgagtgacagagcaagactctgtctcaaaaaaaaagttcatgagactggattctttcatgtgccctcacagccctaaaacacctggacttctctagcaaatcatttgcaggaactgttttaagcaaaatgtttcttctaagatgtctgatatttttaaatggctttttttttggcttccctgttccaaggttagacagaaaaaatgtagcaagtattggccactttaggtacaacacagatttctcctatatttggagagttaattattaaatcaagagtgtgagtattcattttcagttggagccctatggaagaactgctttgctctgggctctctccatctgtacgttatctgatatttagctttatatcactgggacatggttgctgcacaaagagaagacagctggcctgccctgggagcagggtcccacgagttacaagagagtcagagaacaaaccaatgttgtcaaggttacaccttcatttccactgttctttgtttgaaatgttatcagagctgccaggcacagtgcctcatgcctgtaatctcggatattcaggaggctgaggtgggaggattgctcaaggccacaagttcaggactagcttgggcaaaatagtgagattccatctaaaaaaatattatttatcagtaattttaaaacaaaattaactgggcatggtggcacatacttgtagttccaactgtttgggaggctgaggtgggaggataacttgagtccaggggttgcaggctgcagtgagctgtgatgaaaccactgcactccagcctgggtggcagagaaagaccccatctctcttttaaaaaaagttatcagtagctcaaatttcattagctactttgtgaagatgtgttgattctgccatgaaagattttctctgagagtcctatctgtctggcagctggggagtaagtcaccttatattgatcttaagattatggaagcctgggcacggtggctcacgcctgtaatgccagcactttgggaggccgaggcaggtggatcacttgaggtcagagtcggagaccagcctgggcaacatggtgaaaccctgtctctactaaaaatacaaaacttagctaggcatggtggtgggcacctgtaatcccagctactcaagaggctgaggcaggagaatcacttgaacctgggagatggaggttgcagtgagccaagattgagacattgctggctgacagagcaagactccatctcaaaaaaaaaaaggggggtgggtatggaaaagaatgtaatatttgtggaattgctatggtttaatgtactttgtatttttctttttttggtttcttcatagctccgtatactattatcacgttcccttttctatttgctgtgatgtttggagacttcggtcatggcattttaatgaccctttttgctgtgtggatggtactgagggagagccggatcctttcccagaagaatgagaatgaggtaatgtttaagttacatctgcattgaactgaaattttataatttcccaagcattcattatgaaaattatgatctggaagtcttttatccatgaatttatcaaaaggaagtagagaagttatgttcattttaacaccaaagacgacatgtgcaagctggaagtggtagtgtgtgcctgtagtcccagctacttggaggctgaggcaggagaatcacttgagcccaggaattcgagaccagcataggcaacatagtgagaccccatctctaaaaaaataaaaattatttaggtttggtgcaaaagttattgcggttttggctgccaaaagaaatggccaaaaccgcagtaacttttgtgccaacctaataaaaaaatagaggccacatcctgtgaaagtgactgtctcattagcattgtattttggtttttacttcaagctctctgaatcaggatggggtaaagtagtgctggagaaaggggcaggtatattctgaataacattgtcacaatgtgagctgcagtgagtacattctcattacttctttcttctggttcccagatgtttagcactgtgttcagtggtcgatacattattttattgatgggtgtgttctccatgtacactggcctcatctacaatgattgcttttccaagtctcttaatatctttgggtcatcctggagtgtacggccgatgtttacttataattggacgtaagttgcagaagaagctaaaattcaaagcttattcctttcatgtgcagccctgatttttaagacaagtggtaaactgacacttctttaggaagtggtgacagtgtctcctcattcatgctccacactgtgagttgctttgtgatttgttcagcaagtatccaggaactaagattagaaatgattttttttttttttggaaactaaaaccagattccccagttccctacttgattgtgtgtttgtgtgtttaatttttctttttgtcattttggatccctcagtctcagctgctagtctctcctctttatttttcccctcccattttattgaagagacaagatagctacagtaatttattttggggtcagtttctggacccttgttgtttccctctcttgttcaaaaataatgtgactttttccctgtcatggtagtgaagagacgcttcgggggaaccctgttctacagctgaacccagccctccctggagtgtttggtggaccatacccttttggcattgatccagtaagaggacttccttcctatatgctaacctcaaattttttaacactaaccctgaagcaagagaattaaaatgaagataaatagttatgtgggctttcactgggcatggtcgctcatgcctgtaatcccagcactttgggaggccgaggaggtgggatcacctgaggtcagcatggtgaaaccctatctctactaaaaataaaatattagccgggcgtggtggcgcatgcctgtagtcccagctacccgggagactgaggcaggagaatcgcttgaacctgggaggcagaggttgcagtgagcaagctgcactccagcctgtgtgacagagcaagactccgtctcaaaaaaaaaaaaaaaaaaaagaaagaaagaaagaaacaaacaaaaatagttatgtgggttttcgttgacatatttttgggaaaccttgatgtatgtattcagaggacttctaagccataagagacccaagtgccttgaggagccacatacttttccctgcgctgcttatttctgaggtggttaataatatcgactctgggaagattgatttttcaagactccttcccatttcttaatttatttctgcttacttagtttggttttttatttttagcagacattttagcaaagcagaaatatatttttcctgtggattttagacttgcattcttatatttacgaacttacaaaaacttatccgagaattaatttttttttcaaatgcttaggcaaattaagtatgatcaagtcttctttattgtgtgctgtaaaaatggagtggcggcaagaatgtaatacagggcatctgactgctgaggaaaaaaaaaaataatacaggctgggcgaggtggctcatgcctgtaatcccagcactttgggacacagagtcaggtggatcacttgaggtcaggagttcgagaccagcctggtcaacatggtgaaaccccatctctactaaaaatacagaaattagctgggcacggtggcatatgcctgtagtcccagctacaggaggctgtggaagaattgcttgcgcccgggaggaggaggttgcagtgagcccagatcgtgccactgcactccagcctgggggacatagcaagactccatctcaaaaaaatagatggaatgacagcaccacagggctacaatcagcgaaacatagactgtgggaaaatatataagataaacaacccaatttcttcaaaagaaattttgtaatgaatgaaaaaggaaagatggaaggagaacctgtagtttagagactcaagagatatatctacaatcataatgtataagccaggcacggtggctcacgcctgtaatcccagcactttgggaggccgaggcagacagatgacttgcggtcaggaaattccagaccagccagggcaacatagtgaaaccccatctctaccagaagtataaaaattggccgggtgtggtggtgcacgcctgtagtcctaaggcaggaggctaaggcaggagaacagcttgaacctgggaggcagaggttgcagtgagccaagatcacgtaactgcactccggcctgggtgacagagtgaagaccctgtctcaaaaaaaaaaaaaaaaaaaaatggtttggacacagatcagagaaatttgaatattgactatatattttatgatattaaagaatcattgttagctgggcacggtggctcacacctgtaatcccagcactttgggaggccgaggctggtggatcacgaggtcaggagttcaagacctgcctggccaagatggtgaaatcccatctctactaaaaatacaaaaaaaattagccaggcgtggtggcgagcacctgtaattccagctactcgggaagttgaggcagagaattgcttgaacccaggaggcagaggttgtagcgagccgagatcatgccactgcactccagcctgggcgacagagtaagactccatctaaaagaaaaaaaaaaaaaagaaatcattgttaatgcatttacgtgtgatgacaatattgtggtcatgttttaaaaataagtcctggccgggcgcggtggctcacgcctgtaatcccagcaatttgggaggccaaggcgggcggatcatgaggtcaagagatcgagaccttcctggctaacatggtgaaaaccccaccttgcaataggccgagatttcaccactgcactccagcctgggtgacagagcgagagttcatctcaaaaaaaaaagaaaaaaaaaaaaagccttactggccgggcgcagtgactcaagcctgtaatccaagcagtttgggaggccgaggcaagcctcaggccagacctgaggtcaggagtttgagaccagcctggccaacatggtgaaaccccatctctactaaaaatacaaaattagctgggcatcgtggcctgtgcctgtaatcccagctacctgggaggctgaggcaaggcaggaggtggaagttgcagtcagcgagatcatgaacactgcactccatcctgggcaaaaagagcgaaattccatctcaataaataaataaataaataaataagtcttttccttttagacatccacactgaaatatttacaggtaaaatgacatgatatctggactttttagtaatgtggagatgagtgagtggcagtaatcttttttcatgactataaggtgatgttaatttttgaagcattctcctcaaaagcaagattaaaaaaaaaaattttgtcgaagcagagtgataggtgcctgggagtttgttgtaccatcctgtctgcttaagtatctgtttagaattttccataataaataatattgattaataaataaaaattgtcgaccgggcgcggtggctcacgcctgtaatcccagcactttgggaggctgaggcgggcgaatcacgaggtcatgaatcgagaccatcctggctaacacggtgaaaccctgtctctactaaaaatacaaaaaaatagctgggcgtggtggcaggcacctgtagtcccagctacttgggaggctgaggcaggagaatggcgtgaacccggaaggcagagcttgcagtgagctgagatcacgccactgcactccagcctgggtgacagagcgagactcgtctctaaataaataaataaataaaaattgttttttaaacagaggaatatttttccctttgagaattctttataatacctatttgttttctcgggttatgacagatttggaacattgctaccaataaactgacgttcttgaactcctttaagatgaagatgtctgttatccttggtatcatccatatgctgtttggagtcagcctgagtctgttcaaccatatgtgagttgttccatttctgtcataagaatgtgcatagtttagagaatgcttttgtgtaaagaaatcatgacatctttggggagggattaataactcagaacctcattctacattatagaagtgcttttctaaaaatttaatggtgtggccaggcgcggtggatcatgcctgtaatcccagtactttgggaggccaaggccggtggatcacctgaggtcaggagttcgaaaccagcctggccaacacgatgaaaccccgtctctactaaaaatacaaaaatcagccaggtgtagtggcacgcgcctatattcccagctattcgggaggctgaggcaggagaattgcttgaacctgggaggcagaggtcgcagtgagacaagatggcaccactgcactccagcctgagcgacagagtgagactctgcctcaaaaaaaataaataaataaataaatttcatggtctggccgggtgcagtggcttacacttgtaatccagcactttgggaagatgaggcgggcagatcacttgaggtcaggagttcaagaccagcctggcccacatggtgaaactccgtctctactaaaaatacaaaaaattagccgggtgtggtggcgtgcacctgtaatcccagctactctggtggctgaggcaggagaattgcttgaacccaggaggcagaggttgcagtaaaccaagataacaccactgcactccagtcggggtgacagagcaagactccatctcaaaaaaaaaaaaaatgttgatggtcttaaattagacttaatattagtcctttaacaatttactgttccagtaaagatccttgaaaaaaacttgagcaattttcatcaaaataagtgaggtctctttttttccttgatgtgcaactcacataaaattattagctgtggactgggtgtgggggctcacacctgtaatgccagcactttgggaggccaaggcaggcggatcacttgagcccaagagttcaagacaagcctgggtaacacggcaaaagaccccatctctacaaaaaaaaaaaaaaaaaaaagttatgaactgtggtctcaaaatgtactagatttttccattctctttctcatggagagaatggtggggatggtattggagccgttcaaggttcaaaagtttaaggcctggcacaatggctcacatctgtcatcctgcactttgggaggccaaggcgggcagatcacctgatgtcaggagttcaagaccagtctgggcaacatggcaaaaccccatctctacaaaaaaatgtaaaaattagctgggtgtggtggcgcatgcctgtagtcccagctactcgagaggctgaggtaagaggattgcctaagcccagggaggttaagactgcggtgagccaatattgcaccactgtactccaggctgggtagcagagtgagaccctgtctcaaaaaagaaaaagcaacagcaaaacaaaaccaaggttcaaaagtttgaccgtgatagttaatcctgcattgtctctgttgtctccagcttctggttgctgctgcttaaagtgataaagacagaattgagggggtattaagtagaaaaatctagtgaatactccattcagtgtaggagtggccctaggcccatttacccttaacatttttttctctctcctttttagctatttcaagaagcccctgaatatctactttggatttattcctgaaataatcttcatgacctctttgtttggctatttggttatccttattttttacaagtggacggcctatgatgctcatacctctgagaatgcaccaagccttctgatccatttcataaacatgttcctcttttcctacccagagtctggttattcaatgttgtattctggacaggtacgtcagcccagaggcagactgtctgagatgattatacttgatcaggaagccagatgtttctctgaccctaaaaaatttataactgcccttctatgggacaattctagggctttgccacaaaatgtgataattattttgagaaattggatagtgttattcatagattagtaagaaagtactgttgggggaaatttgtgccatatttggaaactgcgtatgtgatcggtagacttttatatgatgtaccttgtccttcttcttactctgcagaaaggaattcagtgtttcctggtagtggttgcactactgtgtgtaccttggatgctgctgtttaaaccattggtccttcgccgtcagtatttgaggagaaagcatttggtaggtgtatttctattgctaaaagttactagacttttgttttgttcaagatcaaggcaattccccagtggatataattaattgtgcacaaatctatatattctttttctttttctttttctttttttgagacggagtctcgctctgtcccccaggctggggtgcagtggtacgatcttggctcactgcaacctccacctcccaggttcaagcaattcttttgcctcagcctcctgtgtcactgggattataggtgtacgccaccacacctggctaattcttgtatttttagtagagacggggtttcaccatgttagccaggctggtttcgaactcctaacctcatgatccgtccaccttggcctcccaaagtgctgggattacaagcgtgagccaccatgcccggccacaaatctgtatactattaaaacgcatttgtggccgggcgcagtgcctcactgctgtaatcccagcactttagcactttgggaggccgaggtgggtggatcacttgaggtcaggagtttgagaccagcctggccaacatggtgaaaccccatctttactaaaaatacaaaaattagccaagcgtgttggcgcgtgcctgtagtcccagctacttgggaggctgaggtggaaggatcgcttgaatctgagaggcggaggttgcagtcagccaagattgtgccactgtactccagcatggggacagagtgagactctgtctcaaaaacaaaaaaccaaacaaacaaaacgcatttgtgttatgtcccagcacgagcactgggcctgccaagtcagagaaacatgtctgctgctcaagatatctggattcagctttgagtagctagaggagagaaaagtcacaaatttttacctttcctggtcatgcttttgctcacgctgcgctcaggaaaatgtaggcctatgcctgtctagatgtagcatcagccaaagccaagcaaagctgcaagagctgcagatgggtgaactcactcatgcggtttgcctgggcaaccacaggactgacattgagacattttcctttcaaatgagactgtgataactttcactgaccaaaacatctgggaaaaaggtttggtttaaagcacgttgattttttttctttttaaaaagcagcatatgtatatacgtttacttaatgtctgtgtgtatatgaattctgcgcgcgcacacacacacacacacacagagttaaatttgcgagatgttcagtatcatgcataatttctgggtatccaatagcacttactttacactgcctgggaaaacccaaacgatcttgttgcatgactcttaaacggctgttagatgatgactcccgtggagagcagctgagttacaagaccctccttctcccttttctgaccatcttcatccttccatgtaccctccatttgtctccccacttcactccctccctcttttgttttctttccccttcttcttttcttccattcactatcaggaagggcaacctgtggaggccccagtcagcccaaacccgagccaacagggactagaggcagcagcggctgcaacagtgagtgaattaaaaccaacaaaccatcacatttcatttaaagaggtggcaaacagtgcagcagaattctttttaattaaattgagagcatgggacatgtgtacttttgggaaatatgtccttgttactcactgagatgatgacagaagttccacctcttaagaatagattctggcatcatctttagcattggtctactaagtttctattcaaaaatgtaagtacaggcatgtccatggcaacaaagtggcttgttgtaccctcactgagtcccatcatcttaatccaagatgacagctcttggactcacccactttcatgtctgtattttgtgaccatgtattggatgatttttcagcatggaagcgagaatatctctgtgattcttgaattgatttccctgcactttagagttctactttagagtgatgcttggacatttgatcttttttagtagtaacttaccttctttttgaaagtgaaagtttatacatgtttagttttttgtgagaaactcagaagacctcacatgtcctcagctgttccagtgagacctctgctctccgatgtgtcgtgtgtactgtcatctggtgtcataaccaaagtgatctgtcttgatccttccctcttctgatactaattcaagattcagtaacagcactttgaatatttgtccttaaaaacatcttttaaacaaaatcttacaatgcacaaatatattagcctaatatattctaagttatgaatgaatctataagattgtaaaagtctcaccagtagtgattacgcattacttctatgtgctcgaagcatatacttctttaaataaaatgaaagatttagatggataaccatttccttcattaagtgtttctgatgattttaaacttggaaaatttcttatggtcatccttctggaactagtctaagtcatccttctggaactagtctaaaagggctgacattttgagtcagaaaaaattttaatcttgctgcttaaaatacattttcaagtagggacttccctgtgagacatttaacaaacctttagaacacatactacctattgtcaatgtccttaacacatactcttttttctgctagtcttagcatatataagatgtgcttctgacaagatcttaatgcatttaagtcttgcgacttcttctgtgataaattctaagttaaaagttccccgtttggaaacctgcacattcatagggtcttcttaccccactggttctttagccaaacatctgttcctggagagcagcctgaaggcatcaggatgatcagtctacaagaaagtctctggatttttgaccccagagggctgaggatatgaacagtgatctggttttgttctgttctttgtccccttggttgtctgtgagtgatatatcacagtttaatttttcttttcttttttctgctgacatgtgtctctcatcccccttcctgtaactctcattcctgtgttctgaagagatcattattagtgtctggctgggagatttaacctgtctgctcctcagtttatctgctagttggagaaagcttcagaaatggccttctactttgggagccttgaaccttgaagccttcctcctatatcttataacccagccgaggttatgcaggagtcccctcctgtgcccttcgttgcattttcagtccaccttctgagggttgccaggtggaatatgtgcatgacctggaggtgtccaggctctggtggcccacaagtctgactgcacatcacagtcacctggtagactttgaatttgtttcttagggtattaaaacaaataagtggaagaagaaataaaagtggcccataatttcatggtcctgacaatcccctactgacattaaaaaaataaagcaataggtgcacttggctagagaatgcatatagtgctaactaagaagaaaaccacctgcccccactacagtcctcctcttcagggggcattgttaacaggtgggggccttgcctctgacagatatctgcctgtcttctattgataggtgtgtgtgtgctctatgcatctagaaaaagacacatgaggaattgtgttttaaactgtggcactgttctgcctctcgatctattacgttttttaaaagttagtgtatcttgaagattgtttcatagtgataatcacttttttttttttttttctgagatgaagtcttgatctgtcacccagctgtagtgcagtggcacgatctcagctcactacaacctccacctcccaggttcaagcaattctcctgcctcagcctcatgagtagctaggattatgggcatgcaccactacgcctggctaatttttgttttgttttgtttttgagatagagtcttgccctgtcgcccaggctagagtgcagtggcacgatcttggctcactacaacctccgcctccccagttcaagcaattctcctgcctcagcttcctgagtagctgggattacaggcacccaccacctcccccggctaatttttgtatttttagtagagacagggtctcaccatgttggccaggctggtcttgaactcctgacctcgtgatccacctgcctcaggctcccaaagtgctgggattacaggtgtgagccactgtgcctggactaatttttggatttttaggagagacggggtttcaccatgttggccgggctggtctcgaactcctgaccttgtgatctgcccgctgtggcctcccaaagtgctgggattacaggtgtgagccactgtgcccagctgactatcactcttttttatggttgcctagcattccatagaatattccactggacatgccaaagtcattatctctttgatggatgtgttggttgttcccaattctttgctatcacaaacagcaattcagggaacatcctttttcatatgtctttttttttttttttcttgagacagagtctcgctgtgttgcccaagatggagtgcagtggtatgatctcagctcactgcaaccatcacctcccgggtttcagcagttgtcctgcttcagcctccagagtagctgggattacaggcgcccacctctacgcccaactaatttttgtatttttagtagagacggggtttcgccatgttggccaggctgatcacgaacttttgacctcaggtgatctgcctgactcggccttccaaaatgctaggattacaggcatgagccaccgcgcccagccccttatccatataccttgccaaagttttgcaagcctagatgttccagcagtgggattgctgaatctcaaagggttcatgcatttaaaattttgataaacccttcacaatgattatacaatttgtacttgggaatatatttttaaaatacagatttattgggccccaccccagaactactaaatttacaatttctgggagtagtatttgagaatttctatttaaaatgcagcttttggggtaattctaatgcaactagttctctgaccagcatgttaaggaccactgctagagtaggagggaggatttgtgcaaataattagatctgaggtgggcattaaactgtgatgagagctgtggcaaaaaatggcacaccaggaggtggagctgaggatgaggagcgcagggcagctgcgcaggcctcctgcacgctactcatgctgctgcccgaaggccaggttgcaggagagctgcccttgagctcttgccttgtttggccccctggacagaaaccatatgaagtgattctgggggctgctgtttaaattccttttcacgctgtggcaggttagcactaattgggatctgtgagacttaactcatttctgcctggttttttttcccaaagagtcttttttgctttgggtttggaaaaactcaagttttttcaaatcaagttgactttaaaatctacttttggagaccctacaaaagactgtgtttgtgaactcagaagaagcaaatgccccatcagcgtctgcccacgtgcctgtggaagaattgttctaacattccagagctgtctgctgaagaaaaggagcccctactcatctttttaagctcagcattctctagccacaagtgaatgtacattaagcatttttttccttctctgaccttggaagctttttgttcctgggcagagacatggtacatttctggaagaagttgctggaattcttgggctcctgttaaaagcttatcagactagggtacaatcacaatgtcacttggccccccttcctcttagaaagtctaatcgttagggccagaaaagcttaggcccttgcagcctttacagatagagctgtacttgttgtgagaatctgttcatattaaggttttcattcaagcaggattctcaattagtgttgacccaggtgaggctggtgcctcttggcacagcagacagaactgcatatttcctctgaagcagggtaaggtggtaattgtaggttgggctggggctggggaggcggtggttggggtggaacagttgtttgattttacttagccgttcagtcagtgggttttgtttttgttgttagacatatgcttttctgaggtttgtgttactaaccatcgcccttcccacctcacagaatgtcatgttaaagcccaggcaaattctactctttctgttcatctgtgtagggaactctcaactttggtgggatcagggtgggcaacggaccgacagaggaggatgctgagattattcagcatgaccagctctccacccactcagaggacgcagacgaggtaagatcccgtggtgtgggctttctctccttccacctcgggtcagccctagtcttgtgtacctaagaggcctcactccagtcttctccttgaaaaataaaaatactaattaatattcagcctgccttctggacctcttagggcaccacagctttttccagtgggccctgccctaagctccagctgttgcccccagagcccgcagcagttttgctcctatcttgaattccagattttgcccgcagtgctctgcacgcaggtctccattactgactgctctctcacctgaggcagagcaggcctcagcatcccagctcttatgacctgaaacacaggtcactaagcacagcttcttcatccattgacccttccaaggatcgttccaattacattactgaccagctataatcactggtacttttgaagtcctacaccactgatgtgttcttgctgcagatattttgtttgagcttttttggtgtcatttgcctactttttacagggagagagagaattaggccaaactagacttttccttaagataccacctccaagcccactctccttgcctgaccccttgtagcacaaagcctctgaactgaactattaaatctcatctactcattatgttctttttaaagcaaataaaataggagttgaggactcaagttggacttttcagtctgtctgaccactttcactatatatgattttttaaaaaagaaatcacaagggttgtggatgcctttaaaaaatatgtatcttaatgctctaaattcctgctgatttcgctttgtgtatatgctgaggaggcctgcctccaacgtgctagcccatttaacatgaacagtcctccccaagaagcattcagtagccttgtgctcctaacttgtgaccttgtgtgtggcgtggctccccactaagtgtaaatttgtgttttcaagccttccgaggacgaagtggtaagatgaaagctggcgttgccttcgtgtttatccgggcttctctcttcccatccttgtgatcactctgctgaccctgccacaccctggggccatacacatgactcctgtgcctctgcatctcactggccatttcaaaccagttcgtgagcctgtgttctaaaaagctcatctccattaactgcatctcatgtcggtcacctctgtctttgtttcattgactttgctgatttaacacctctgagaatggctttgaaaggagctacaagtaatgtcttcactggcattcttgaagtgactcctcttgggggttaagtcccattggcctctgccttcctctcctgtgatgttgtggttgatctactcccagccaccgggagtagccgtttcctccctgctcctcctagtgcttgtgagcaaaccttacccttcctccctgtctgagccagcctcttcctgctgccctcctcagcttgatgatgcttcaacttagaagtggtggacccttctcggggtcagctctacctccatgtgacccaggtgagagggagacagctttcaaaaggaggctttgccttccagatgcatcccaaaggaaataatccatctgtgtgaaaggagttcatattatatcagccacatagagaataacggagactggaaagcaaattggctaactgttcaggccacatctcgagtagaaggccctctggctcagcagtaattcacttagcaacatacactctttaaactgggtttttaaaacaccttgctgcactgtttgcatcttcccccagcacttctctctaaaatgcctagacccacaaaccatacccttcccttcctgactctcggtcctctctaggagggcagtgggatgggaatgggaaagcctttgctgttctgtgtaaacacaggtagggcctgctcttcctgaagcctagagaggctcctttgctggcatcaaagagtgtctgtgttcctggactgctcatctatgcagtccctggctgagctacctggcagggatgggtggggcgtgctccatgttaatgaggagcccaaccctttccctggctcactacctccaacaacactgccttttaaatgttttcctagccgagcacccacattgtcagaatggtctgaccaactattgtgtaccagcgttctcgtttgtagccatgtcccaggaggttggacatccaacaagatagactctaattcagcctccccagtctctggccacccagctcactcagggattcagctacccttggctacccaagtagtctaaacattttatctttatcaggcacatatacagtctggttctctgtagccaaatttagatacccatgacatttatctaatgatttcaaaccaaacaggttcctaaaaaaacattcagcctacttctagaacttccccattttgcttggctgtgaaaatgtatttgtcccatgcaggcccttgctccagcccagtggaagcattagtacctcttcctagcgggaactcagtccagctacacaccagagccaggccagtggttgtctgggaaatcttcaaaggccgtgaccactcagcaagggtcagtggcacctctccccactgtctcctcaccaggtgcattcatcccatccatccatgcattcactcaccctccgtgttgtccagcactatgtatagtgctgcagaaacaagaagaatatagtgcttgccttcaaagacctcccaaagtggggagatagtctggatgacaggtgctgtaatagaagtgtgccccggatgctataggagcacagaaagagggcaactgatgaacactggggtgagagtggaagaggagaccctggaagactccctaaggaagttgtcttactctggtcaagcaggaggccctgtagagggagtggtgcagacccaccagcatatgcagcttcacaggggcaaaacacctgtaggtccatcacgtgttggggactagcaagtattcagcttggctggagcagaggcaggagtggggaactggggacaggtgagactagaggttggcagaaaccagccatagtagtttttgcctcatttggacaacaaggagccatccaagagagagcggtgaagctgatggtgacacagccatggcgcattgaaatacccccagtggctgtgttgtagggtatattgggttggggagggacaaggtcaggaggcatagactcgacatcatctgatgtgattcaggacagaatggcgagcctgaagtgaagtgtctgtaggataagttggaaaggaaggaaccaatatgagatattaaagaagtgaaagctataggtcccagtgccttaataaaggtaaggagtaagagaagattcgagattgactcccagactctccagtctgctggacatgggagatggaatagaagttgatctcggtgtggtcagaggagagcagttactgtgttgagcatggagagcctgtcgttccccaggagaaggagtacagctggctggaaataggcaaggcagagatggagagatccaccttggagtcactcctaggggcgacccttgaagccctgagtagcaatcccaccagaaagatgcaagggctgaagctgaaacttcagagagcatcggcatttaaggaagaaccttggctgggcgtggtggctcacgcctgtaatcccagcactttgggaggctgaggcgggcggattgcttgagcccaggagtttgagaccagctggccaacgtggtgaaaccccgtctctactaaaaatacataaattagctgggcggtagtggcatgtgcctgtaatcccagctactcgggaggctgagagaggagaatcacttgattctcctgggaggcagaggttgtggtgagctgagatcgtgccactgcactcctgtcttgaaaaaagaaaaaaaaaaggaagaacctcgatggagactaaaaagaactgtccagagaggtaggaggaaaaccaagggatggcaggtatttcaaaaaggaggaagaggctatggtgacagacactgcaggagcatggacaagggcacagaacatctgttagctttaacagctgggccaggcgcgggggctcacgcctgtaatccccagcactttgggaggccaaggtgggtggatcacctgaagtcaggagtttgagaccagcctggccaacatggtgaaatcccatctttactaaaaaattagccgggtgtggtggtgcgtgcctgtaatcccagctactgaggaggctgaggcaggagaattgcttgaacccgggaggcagaggttgcagtgagctgagatcgcaccactgcactctagcctgggtgacaagtgaaactccgtctcaaaaaaaaaagtaacaactgggaggttagggtgaccttactaagtagaggcattttgtggaggagtgaaggtggaagccagggtgcagtagggtgaggactggctgggcagagaggaaactgaggcagaagatgtggacagggactctgcagcgattcatggttggtcatggccgattgatacgggcgtgtgctgagtggcagactcataagtgctgagctggatttctcacccagtccttgcttctcctgagaacacctgcaggaagctgggaatgaaggagagaaggcaagggtaaggcctggaagcgaggcttctctcctgtcctgcagtttattcggtgggagaaacttgaggtagaataaaaacactgaagggattggctgtaagggagcccagtggtcactgccctcccagcccataggagtagagatcagcactcctgggagccatggacttcttcctctcaatgcgggccctggggcggcagccagcagtggtaggaaagagctcttaaccacggtgttgggatttagggaactcagggaactaggattaccctagttttcagggtaagtaaggaagcttgaagagcctgttccggaagaaaagcccagaaataggctaggtgtcgacagaggtgagggagaagcagacgttcgcccagagatggcatggtggagccagccccctccacgctggctgcacccctgtggcctgggctgttgtggctttaccagccaagccactttctcccatccccatgttctcagtgatttcccaaggcatttctggtgtcctttgggagtggaatcacgtgggttttgaaaggaactgcggtgaaaaatagaccctgacctgagggcaggggccgatggggaggccactgagccctcaggagtgtctgaaagctcagaagattctggtctgggctctgcggggggaagccccataagggagcgcctcctggtctttggtcagcttgacagagaggcccagggaaagtacctggggcttccagaatataccaaattcagaagcccacattcacccctgactgtgcttggagcaaacctgaaagttcactcccaagagcttgttccagcccattcctttattctggaaataattcttggtattgaaaggaaaactgggacaaagggagcttgaggaaaacgaaaacaaacaagaaactggagatatgctatttagtcttaacccaaacagatatgctgtttggccttaacccatgtggaaatttgtaaactttgtcaggatttccctgtgcatggtggtgaaatcatgtagggaaaaaaaaattcaccgtgtaatctctttagaagtcacaaaagaaaaagaaggttatcttgctcccaaaaggctgtaaaaagaataagtaaagtggccatagaggcctagtcttctcaggacagtgtccgggttgagagtctgtctcctgaagcgcactctggggaaaatcccttcctgccctcctgcaggtccttagggtcccagacccagacagtcactttctcaacagagtgccgtcaactcagcacacactcctctcttgagcacagagccccagagggagaagaacaaatgtgttgaaaagaatcttattaagatgtagttaattaaaatgtaatgtattgaggggaatggaggtgtcccaggtgagggctaagtcaggcaggatttttggggaaggcattgccgaaatcaccacctgagctcaacactgggtgcttctggcccctccagagttgaggtgccatccatgggaagtgcagtcccctgccctggcccaggttcaaagcgccaagtagccacaactcagaatgcctgcacgttcccctcctagccttatatcttctctctggtttcctcccacgacagtttgactttggggacaccatggtccaccaggccatccacaccatcgagtactgcctgggctgcatctccaacactgcctcctacttgcggctctgggccctcagcctcgctcatgcgcgtgagtacctctctccgggctccggaactctagtttccccctctgtgggcgcactgtcagttggggggcttaagtcaaatggaaattacatgaaggttctggaattattcaggttcctgaacccaaggagaatgagtacagacaggaggctcagcacttgtgccaggttagctctgcatggtggtcccactaaggcagtgggaagccaggatccagggaaccctagagcagggggatggcagagcaaaattcatggcctacagctgcctcttgccaaactgcactggattttgtgtctcccattccccagagctgtctgaggtgctttggaccatggtgatccacatcggcctgagcgtgaagagcttggcgggaggtttggtgctgttcttcttcttcactgcctttgccaccctgaccgtggccatcctcctgatcatggagggcctctcggcctttctccacgcactgcgcttacactggtgaggggcagtggggcagggcgggcatgggggtggatgtgtccttagctgcggtgagagggcagcttttctcccacacacagccctgcagctctgtgcaggaaagatgagctggccctgcactagcttcacctcaggacaccccagcaccggcattgccacagagtttcggaaaatggtcacagaaaagcacagctcagccttccctaggctctagggagatgtccctggtgagtggtgtcaggtcccgctccctgcctttagctgtccccagtgctcctgattttggcttaaaggggctgctggggtcttagggtttctggttttctctctgatgtgtaactcttctgtcttcagaacagtggaagcagctctggaatgtatgttaagtgcaggaaaggctagaacacgctgcaccccagctttatcctctttgttctgtcattgtgccaggggtctttgagttggacccctggcagctccattgtggaccggagggattcctggctctatagggtggaggtcggtacactcacgcagcttcttcacatgggcaggtttggggtggttctgtttgttttctttaatgaagcttgtgactcttaatggctgtgtgtggagagagcatgagttcagcctctgggactgggagagcgggggtgtggtctgggctgtgaccacctcaaaccagcgttgccagatgtagcacataaaagtacagtttggctgggcacggtggctcatgcctgtaatcctagcactttgggaggctaaggcaggtgaatcacctgaggtcaggaattcgagaccagcctggccaacatggtaaaaccccgtctctactaaatatacaaaaattagccaggtgtggtggcacgtgcctgtaatcccagctactcaggaggctgaggcaggaaagaatctcttaaacccaggaggcaggggttgcagtgagctgagattgtgccactgcactccagcctgggcaacagagcgagactctgtctcaaaaaaaaaaaaaaaaaaataggggaggggttgggggccaggcacggtggttcactcctgtaatcccagcactttgggaggccgaggcgggtggatcacctgaggtggggagttcgagaccagcctgaccaacatggagaaacgctgtctctactaaaaatacaaaaacattagccgggcatggtggtgcatgcctggaatctcagctacttgggaggctgaggcaggagaatcgcttgaacccaggaagtggaggttgcattgagccaagatcgcgccattgtactccagcctgggcaacaagagtgaaactcggtctcaaaaaataaaaatacagggtgtatttcacataaacaacaaataatttttttagtatgagtatttcccaaatgtgcatgggatatgcttatactaaaaactggggcagtctgtattttctgtggctgttccacctcagactccacttctttgggtctctattttctcctttatgttgtgattctctttttgggggtctcaaaaccccaatgtctctggaagttctggcccctctccccagaggagcactcacacacttctcctgttttacaagcataggggtctgactcactggtgtgccttagaggcccctggatgggatgctctgtggtgttcatgatctcaaggccagaagaggactatgaatgtctctcttcgttctcaaaacctgaagaaaatccagcatctgaacctgagaaactcattccccactcccctttatctttgattattctcatggctgggtgacccctgagcctcctcaaagattcagctgtgggtttttctgaatgatgggcggagagtgaggcatggaagggcaagacgtggctagggtgcactcttcttcaaaagccctgctgcgtcagtagacctggcttcctctggcctggctctctccctcctggcctccctcctccccacccagctcatctggctggcctccctgttctaagcttatcagccgacccccgcaagcacacttcctcagccctcctcagtgcacgagaacctctgaggactcactttttcttgccccttggcctcctttcttttcttttcactcctgtctcttgagccctgggtttgagggaacagtgaccacctcaccttgattccagcccacgtgggtagccggtcatctccctgggcagggcgggagcaaggcactgttgcagagcaaggccgcctgggcttgagcctcattttgttgccagaagattgcttcctcctcaggctcacctgtggcctccccgtgtcttcccaggtccccctgaactgaagtgatgagtggcaggacagcaggctccggaattgggcgacctgggttggaattccagcactgtcacaccaggcagggaacctgagcagaacattcactgccaagattactgtgagcaagtaggaagtaatgcacacaccaagtgctgccacagcaaaagcaggtgctctaggatgggtagtggctgctctgcttaaaagtgggatgcccttactgggtgcgatggctcacacctataatcccagcattctgggaggctgaggcaggcagatcacctgaggtcaggagttcgagaccagcctggacaacatggtgaaaccccatctctactaaaaatgcaaacattagctgggcgtgatggtgggcgcctgtaatcccagctactcgggaggctgaggcaagagaatcgcttgaacccaggagatggaggttgcagtgagccaagatcgcgccactgcactgcaacctgggcgacagaccgagactccgtctcaaaacaacaacaacaacaacaacaacaaaaaaacctgggatgccctagagagagggtgtctgcctggggtcccccataaaaagactgcttttagcctgtctagagtgagagaagaccccagaggaggcagaggataccatcagaatgccctcaggtgctgtttgcaaggaacagcctccccatatatgtcgtatttattttggcaataggagtattgggtaggagaggaaaaaacagtgcaaacctcctttgtgcaacttccagaatctcgtctttggagggctgttcccgtgacacgagtggggcgcctcccccaccactaaaacagaagtgaatgaaattggtgcttgtgcgccccctcctggcaaaatgcggctgtgcgtccaggatgcctggatcttccctgtggcccaggactgcaggaggcgttctgagctgtggccctcttaccaggggtggagcctctggggctgctgaaccagctgtagggatggtgctgctgttcttcctggcatccatcctaggcatcttcatacctcccactttatccctgctgtttcctgattcaagggctgccccattatacaagttctggtctcctcagtggggacaataagaaaaacatttgattcgataacatataaaccactagtgtgagattcatgcagcatcataggaaggggggtgatgtgtttgaaaacagtgagcaggctaatgtattaatctgctaattctgtctcctgagttttctctcttttcctccctcctgccacatgaagtgtgcttggcttcttacctaccataattagacatcttttcttcctcagagaaggcatgagacagggatttgattgtagttatcactgtaaacatcaaactgatttttatgcagaactattgccccagggcataccttccaaggaacctggtctctccttacctagcgaattccacatacacatagatgtacacctacctgtacactcacagattgggtggtgattaaagggacagaatcggggaccagcttcttgttaggaatgcagtgttgccacggcatgacagcatggagcagttgagggaatggctgcccaggagaactcagaactcttgaaatgtagttccaggctgccatcattgccctgatattcaggccgtcagacagatgtgtgttgtaggccctgaacggcacagagagtggcagaacaggctacataaacagctcagcccagaattgtctttccagactgcctgccctcagtcacaacccccaccagggaagggaagcggccccaagactccttcctccttcacccactcgaggaaacagagttcctgttacgtggcatgaatgatgtcttttggccccagttaatccctctgagtcaccaggtggcctttgccaagtgctggagctggaagagatgatagagacactcatctggcgtcctgaggctctcctcacagctgttgaattctagaggtgcatttcagtgtcttggggcatggcaagactttggaggctccctgagcagagcagtggagatgcccaaaaagaaggaagaacctaggatggcagatggggccccccttgccctggggaacttcatgtttgtactttctcaggaagcacacatttccccagttcagcgggagagagtggggagactagcagggaaattgctttccagctttgtgctgggtggttggggtgagggtggccacggaaggaggtgaaatcaggctgacctcaagatagacccaagatgtcccagttctggccgctctaagtctctaaagcagcagctggtgggaggggcagtattgggcagtatgtcagggaggccacctgtctgctcacacagtacaattgatgtgcccctcccaggcatatatccctcttcctccttgctgggcccccatgggtagataaggtgactggaggggtgccaagaaaagggcggtgcccccacaggcatctgaaaacaaagctgctgctccatttgcccagtttgaagattagaatggttttgtgattagccaggagggggtgggggtcagagttctggacacctcactggagtcgggggtcagcataccctaccaaggctgacattcactcctaggtaatggcctgggaccctcaggtgacttgtccactctctggctatgtattgttgaatgaaaaggggacatgtaaatctcgtttcagctgttctgaaataacccttgccacatgggaacacagtctattcaacatgaagaattcaaacctaacacaagtgggtgagaagcaggaacccactgctaggccccaccgcgttccctcagaggtggtctcagtagctggaacttggagaagtagttttggtggggtgttgggacgtgggtgaatccaggtcctggtttggaattgctctggtgggaaccgtcagctaacgtcagttggaagctctgtgtcctccccctcctgagtcctgtttttcctggaggaccttggcccacccctgtggaatgtggggatgtggggaagaaagctgactgcttttactcccactcagaaaattcggttgcgctcttcttcaagggggtgctcctcagcctgcaccccagtgaaggggcctctgaggaactcccagtgccactggcaaacagtctgtaacctttgggccccagccacctcccagcccctgttctcttaattcctgccttcttggcttggagggaggaatctccatttgtaaaagctgagttagggaactagagggttcctgaagctttaaagcgcctcaaagccctcaccctgcacgtgacctgtcacctggagcctgccccagcccccacgcctgcctgttcttataggggctccggtgcctccagggtcacacagcaccatgtggaaactattcctcagggcagctctccttggcctttttatcccctgaatcatgcatttttctgcccttatttggtgtggtttggttgctgggcagctgtccagggtgagtttgcaggaggaagcacagccaagcagcctcgctctgcttatgggacagtcttcctcccaccctccctgagagtgaaagggccccacagagaccatcaggcatggatgctgaactgctgggaagggagctcaggctttttctttttagtccccaagagaagaattctttctcagatgtttttgtggttggagaatatttttgccattgctttgagaagacttcccctcctaactccccctctttccttggaatttccttccttaaatggaaagccttcaacattcactccaagctcgcccttttgctcccccaaggaaaaataacaagcaaacagaggtgcttgcccagtgtctctggaggggcttcccttagaggtgggctgtgtgatcccctgccaggagggggcgatgggggccacttgttcattaacgatgttaggctcaaggtaactgaactttttttgcacatgcctctctgcagagagttgtgcataaacacactgctcggcaggacagagcaagattgggaactgagggcaaatcccttcctccgtgcgtcgaactcttgatcccaggccttaaaagtgggatctctgcactctgggctttctctagcttccccagggaagggaggctcggggtgaggtgggcacggggcatctttcctgcccaactgtgaagtcctaaaaagcttcacaaagtttctattgaatgacagctttcttcttctctttctccagggttgagttccagaataaattctacagcgggaccggtttcaagttcttacccttctccttcgagcatattcgggaagggaagtttgaagagtgagtccctgtgagggccgtgtgccccatgctaccctccccgcctccctccacagtgatcagctgtgcctctctgcctgttggttgtgatctgtgggcaccagctcattcgtgtcaccctgtctgtgagtcatttagatagaatagtcctccttgggtctcccaccacccctagctttgtgtgtagtgtagtgattttctggctgtcactcatactcactgggcaccagccttgccctcttagcctccatccatccagacagcccttcccacctcctggtggtgagccagtctgcattcccacgccatcccaaagccctttcatcttccccgtgcattgtagatggaaggagcacccatgccattcacatctagactttgagttccctgcatctgccaccgtagtttctagcaggagtagtggggggagtaatacagattcttccctagaaggggacactggtaacatgtcccactcttggattagcaggggtgggtccaggaagatgatatttgcgtcttttgcccacccccctggcattcagctggacccaactaggccatcatgagtggcttctccctgtcatccccaggggtcataggatatctacaccgcctttctgaccccaccctgcactcccatcctttcctctctccccgttcatgccctgcactacatagcacagccgggatgcttggaacagaggccttggctgctccgcagtgcacagggcttccctctctcggggttggcttcttcccaggccttgcatgggccctgcccacaagcacaccctcaggccgagggtgcagactgatgctcttccctgatggagaccctgagatcttccccacccccaatcatgatgtcttcagtgtgggactggggtcctcttggttctgcctgcagcctgcctggctccgcccctagtgccccctcctcaccacactggccccaggtctcaggaggggtgtcctgggcagggaaggtcagtgtcactgatggtttgctgtttggaagccattggcagggctgccgtgcatgtggctgtgagggctgcacagtcctgccaaggggcttcctccttgtcaccccgaaccttgtaatcgtgtgctggcgtggcagccctggctaagttaatccccaccgctttcagtggtagaaagaattccctgagtgggccaggctggtgccctcctcctaccctggcttttctgagtgagctgcctggagccctcatcccctctcccaggctgggctggccctgggcggggccactgtgtgctggcccactgtgacctgacccgaccttgtgcagcccccctgccctggtgtcctgggttttcgtgatgatctttgctctgtttccagtggggtttgaagcagagttcagggaaccctgcccaaggtcctcctgttcagacattcctatgttgaataaagtatgtttgacttccccggagaagctgcctgtcactgtgcccacagcccctgcgtcgctccaggctcagccatcttgagcccctgtggacccctgaccttcgcctccctcctccagcattgctgcttttccttctatcaaaggccacagcttcagtaggcctggctgggcagttggtttgggaaattctcaccttgtcccaagtttcccaggcgccttcccactcacaggatccaagtcagctctgcagacactacctgtgggaagaggggactgggcagcccatcttcgtctcccgtttactcattgcacatccagacagcatgggggcagaggggcactgggtatctccccacgcgcctctccctcttctccaagtgtgccctccagggcccagtggcctggctatgttgagccctgataccccggccttagtgtaagtggaggctccacacaggttcctcagggcagctggggaatgtgaggtgctgggattggcaggcggcagggtggagagcaggcagaccgtccagggtggcaggctgggcaggaggccccctccccactgcctagtgaggcactgcattctcggtaccctccctcttcactcctccctccaggggcctccagggcaggggctgcccaggaatgtgacctgggccccagacaggtgaaggggccacaaccccctgttcattccatgttccagcctaacctaaagcccttcctcctccctaacagtgctacctgtccctggtgtcggccctgagaggcccaccccacccagctcctcaaagataaggtcccgagtggaaactctggtcattgaggtctcagcttctgctcagtgggaagggaaggcctcataagaatagatatttggaatcattggattcgaattgagagtccaggaataaatcctaacatttatggtcacttgatttttgataaaggggtcaagataattcaatgaggaaagatctctctttttcaacaaatgacactggtacaatggggtttccacatgcaaagaaacaaatttgggccactatccccaccatatgcaaaaattacctcaaagtggattccagacctaaaatgtaagtgaaaacgataaaactcttaggggaaaccataggagtacatcttcctaaccttgagttagccagtgatttctagatatgacactcaaagcacaagtgataaaaaataaaaaaaaacacatagataagttagccttcagcaaaattaaaagcttttgtgcttcgccgggcacggtggctcacacctgtaatcccagcactttgggaggccgaggcaggcggatcacctgaggtcaggagttcaagaccagcctggccaacatggagaaaccccgtctctactaaaaatacaaacaattagctgagtgtggtggcgcatgcctgtaatcccagcaacttgggaggctgaggcaggagaatcgcttgaacccgggaggcagaggttgcagtgaaccgaggtcgtgccactgtactccagcctgggcgacgagtgaaactccatctcaaaagaaaaaaaaagggtttgtgcttcaaagatcagaatctagaaactgaaaagacaaccctcatagaagaaaatatttgtagatcatatatctgataaaggacttgtatctaggatatataagtaactcttacacccaataataaaaacaactcagtttttttaaatgggcaaaggggttgaataggcatttctccaagtaagcaatatgaatggccaataaacccatgaaaagatgctcaacaccattagtcattacagaaatgcaaatgaaaaccacaatgagataccacatcacacccactaaaaaggcaataagaaaattacaagtgttgggccgggcgcggtggctcatgcctgtaatcctagcactttgggaggccgaggcgggtggatcacgaggtcaggagatcgagaccatcctggctaacacggtgaaaccccgtctctaccaaaaatacaaaaaattagccggccatggtggcgggtgcctatagtcccagctactcgggaggctgaggcaggagaatggcgtgaacctgggaggcggagcttgcagtgagccgagattgcgccactgcactccagcctgggcaacagagcaagactccatctcaaaaaaaatgagaaaattacaagtgttggcaaggagaaattggaacccaattcactgctggtgggaatgtaaaatggtgcagctgctttggaaagcagtctggcagttcctcaacatattaaacagaattggctgggcacagtggctcatgcctgtaatccgagcactttgggaagccgaggtgggtggatcatgaggtcaggagatcaaggccagcctggccaagatgatgaaactccgtctctactaaaaatacaaaaattagccaggcgcagtggcaggtgcctgtaatcccagctactcaggaggctgaggcgggagaatctcttgaacccgggcggcagaggttgcagtgagctgagatcgcaccactgcactccagcctggatgacagagtgagactctgtctcaaaaaaaaatattaaacagaattaacgtaagacccagcaattccactttcttatctaccccaagaaaaatgaaatcatacccacaaaaacttgcacagaaatgttcatggaagtattattcataatagccccaaaatggaaacagcccgatgtccaccagctgataaatggatccataaaaggtgggatgggcatgatgaatattattctacaattaacaagaatgaggtactgatgcatgctacaacatgaatggacctcaaaaaccagccacagaagaccaacaatttatgattccgtgtatctggaatgtctagaatagacaaacccatagacacagatttggtggataccaggagctggctgccagatggggctggggagagagttatgatggggagtgactcccaaggagtatggagtttctttttgaatgatgaaaatgtaaagttaggctgctgatggctgcacaattatgtgaatatactaaaacccattgaattgtacactttacattggtaaatttttttttgagatggagtcttgctctgttgcccaggctggagtacagtggcacaatcttggctcactgcaacctctgcctcccaagttcaaaggattctcccacctcagcctcctgagtagccaggattacaggcacgcaccaccacacctggctaatttttttttttcctgagatggagtttcactcttgttgcccaggctggagtgcaatggcacgatcttcactcactgcaacctctgcctcccgggttcaagcgattctcctgcctcagcctcctgagtagttgggattattggcatggggcaccacaccctaatttttgtatttttagtagagacggggtttggccatgttggccaggctggtctcgaactcctgacctcacgtgatctgcccgccttggccttccaaagtgctgggattacaggcgtgggccaccgcgcccagccttacattagtaaattttatggcatataatctgaataaagtgggagtggcctaggacttccttgggaagaaattcctcccatgtctctctgatgaactgggaggaagcagggccagtgagtccttggctagactgagttctcagaatctagtggccttgggctccttccagctaaagatgggctgaccaagactgagctgtggagtgtgcaggaagtcccagagccctgtggtagggggtggggaacaggatggctgcatccacttgttcctgggggtttttttctttgtttttgttttgttttgcttggttttgttttgtttgagacggagttttgctcttgttgcccaggctggagtccaacggtgcgaccttggctcactgcaacctctgccttccggggttcaagcgattctcttgcctcagcctcccaagttgctgggactacaggcgcctgccaccacgcctggctaatttcttgtatttttagtagagatgagatttcgccatgttggccaggctggtctgtaactcctgacctcaagtgatccacccaccttggcctcccaagtgctgggattacaggcgtgagccactgtgcctggccatttgcttctgttttttttttgttgttgtttgtctgttttttgttttttgtttttttgagacagagtctcgctctgacacccagtctggagtgcagtggcgcaatatcagctcactgcaagctccgcctcccgggttcacgccattctcctgcctcagcctcctgagtagctgggactacaggcgcccgccaccatgcctggctaattttttgtatttttagtagagacggggtttcaccgtgttagccaggatggtctcaatctcctgacctcgtgatccgcccgccttggcctcccaaagtgctgggattgcaggcatgagccaccgcgcccggctgctcctgtttttaagagatgtgcctttaccctgatccccctcttgtggaaccccaggaccccagacatctgtctgatgagtctgtgccctggtccaggaaatgcccctcatcttgaggtcctagaaccagtgtgggagagggtggccttggcatgcttggcctggggagtcccaagctttgtagagataggggacaagtctatcaccaccttcactggatgggactatacttctttctgccccaggaaccttgggtagagggggcattggacctcaaagccagctggcagcctcagcatttcagatcaaagtggcctgcctcttcaacgtctcagcctacccaaggcatgtcctaggtgtaggctgctctctggtggccagatagggaaggactcattcatcctttggcaaggtgggctgcgatctgagctgggctgtgtgataggcaggcaactggattagacgggcagagacaaagcaatcctggggtattctggagcacataagcagaggggtaggctagccaggagcaaaagatgagatgggctggagagcacgcagagagcccagccaacttgcttcacacacactactggaaaagtaatgagttgtgtcacaactcaggctgggcgcagtggctcatgcctgcaatactagcactttgggaggccaaggcgggtggatcacctgaggtcaggagttcaagaccagcctggcgaaaccccgtctctactaaaaatacaaaaattagccaggcaaaaccccgtctctactaaaaatacaaaaattagccagccaatgcatgacagtagtcccagctagtctggaggctgagacaggagatggcaccactgcactccagccatgggggacagagccagactccatctcaaaaaaaaaaaaaaaaaggcgatcaaacagtactaaaggccctattatcaaataaataaataaataaataaataaaggctttcactcacagtgtgactctccccctccctcccacaaccactgtttacagagccttaaaaaaaaagcaaacaaacagatgataatgtgttatcttgctctgtcactctgtggcctggcctgcagtgctgtggtgccatctggactcactgcagcctcgacctcccaggctcaagcgatcctcccctctcaacctccctagtagccgagaccacaggtgcatgccaccatgccgggctaatctttgtattttttgtagagaaggggttttgccatgttgcctaggctggtctcggactcctagattcaagtgatccgcctgcctcaacctcctaggatcaggggccaccgcaacgggctagacttttttttttttttaagtcagggtcttgctttgttgctgccgagaccagctgggtcagagagaccctaacccagcggcgctagaggaattaaagacacacatacagaaatatagaggtgtgaagtgggaaatcaggggtctcacagccttcagagctgagatccctgaacagagatttacccacatatttattaacagcaagccagtcattagcattgtttctacagatattaaattaactaaaagtatcctttgtgggaaacgaagagatgggcaattaaaggaataggttgggctagttaactgcagcaggagcatgtccttaaggcacagatcgttcatgctattgtttatggcttaagaatgcctttaagcagttttccaccctgggcaggccacgtgttccttgccctcattctggtaaactgacagccttccagcgtgggcgttatgttcatcatgaacatgtcacagtgctgcagagattttgtttatggccagttttggggccggtttatggccagattttgcggggcttgttcccaacagttgcctggcttggagtgcagtggtgtgatcatggctcactgcagcctcaaacccctgggctcaagccatcctcccacctcagcctactgaggagctagctgggaccacaaacacaggcctctgtgcccagatgatttttgtagagacagggtttttccatgttacccaggctggtctcaaactcctggactcaagtgttccacctgcctcagcctccctaagtgctgtgactacaggtgtgagccaccacatctagcacacctagtgcagtccttctagagactgggccactcccagccccggagcaaccttacttaagccctccccgatcagataggcagcctgacaagttgcatttcctggggaagagcagcaagaaccctgctctgggagtcaggagttcccgattctagcccagagctgctttccttactagttattgatcttgcccaactcacttcctgtctctggctctgtttcccaatctgtaaaattgttactggaaaggggtcccaatctagacccaaagaaaggtgaggagagcaaaaatcaccccccccaagacaaaaagttcttatctgagcaatttagataaggagcaatccgccaggcgcagtggctcacacctgtaatcccagcactttgggaggccgaggcgggtggatcacgaggttaggagatcgagaccatcctggctaacatggtgaaacctcgtctctactaaaaatacaaaaaattagctgggcgtggtggcggggcacctgtagtcccagctactcgggaggctgaggcaggagaatggcatgaacccgggaggcggagcttgcagtgagcagagatcgaaccactgcactccagcctgggtgatagagcaagactccgtctcaaaaaaaaaaaaaaaaaggagcaatccaaggagcaaagaccacctgttgaccatcaaacaggccatctggaggcgaaactccttgcctggggaatttagaagtaataaaggccaggcatggtgaatcacacacactttgtgagcactttgggagccaaggcaggtggatcacttgaggtcaacagttagagaccagcctggccaacatgatgaaacaccctccctgcaaaaattagccgggcatgatggtgcatgcctgtaatcccagctactcaggagactaagacaggagaattggttgaaccagcaggcagaggttgcagtgagctgagatcaggccactgcactccagcttgggcgacagagggagactctgtctcaaaagaaaaaacaaacaaaaaaaacttccctagtatttaaagtcggcatctgattccaagcctctttcaacttttataagtaactaaaatgtctatacattctttttaaaaaaaaaaaaaaattcaacaaacacttatttctcacacttctggaggctaggaagtccaagatcaaggtgcttatagattcagtgtctggtgggggctcacttcctgctttatgagctatgccttctcactgtggtttcacatggtagaaaggggtagggctttctctctggcctcccttacaaaggcaccaaccccattcctgagggctctgccctcacaacgtaaaatttctgtacattctatgccatgctgaagctcattttacaaccctaagctctcaccttaaggtccatacatgctcctaaggaaaatccaccacagcgcactcagtcctcccgtggaggcacctgctgcactctgctgcagtgttcttcctttctaataaactttccttttccaaacctatactgttgtcagtaagttctttcttttttgagacccctccccccaccccaagacatgccagtagtcccagctagttgggatgctgagacaggagatggcaccactgcactccagcctgggcaacagagcgagactcatctcaaaaaaaaaaaaaaaaggatcaaacagtactaaagaccctattataaaagtctttcactcacagtgtccctgaatctccccctccctcccacaaccactgtttacagagccttaaataaacagatgataatgtgttaccttgctcagtccctggcctggagtgctgtggtgccatctggactcactgcagccttgacctcccagactcaagcgagcctaccctctcaacctcctcagtagctgggaccacaggcacatgccatcatgctgggctaatctttgtattttttgtagagaaggaggggttttgccttgttgcccaggctggtcttggactcctagattcaagtgatctgcctgcctcaacctcttaggatcaggggccactgcaatgggctagacatttttttttttgagtcagggtcttactctgttgcctggcctggagtgcagtggtgtggtcatggctcactgcagcctcaaacccctgggttcaagccgtcctcctgtctcagcctcctgaggagctagctgggaccacaaacacaggccactgtgcccagatgatttttgtagagacagggtttctccatgttacccaggctggtctcgaactcctggacttaagcgctccacctgcctcggcctccctaagtgctgtgactacgggtgtgagccaccacatctagcacacctagtgcagtccttctggagagtgggccactcccagccccggagcagccttactcaagccctccctgatcagataggcagcctgacaagttgcactgcctggggaagagcagcaagaaccctgctctggaagttaagagttcccggttctagcccagagctgctttccttactagttattgatcttgccgaagtcatttcctgtctctggctctgtttcccaatctgtaaaattgttactggaaaggggtcccaatctagaccctaagaaaggtgagagagcgaacgggccccggagacaaaaagttcttatctgagcaatttagataaggagcaatctaaggagcaaagaccacatgttgaccatcaaacaggccatctggaggcaaaacttgtctggagaatttagaagtaatcccagcactttggaaggctgaggtagatggatcacttaaggtcaagagttcgagggagcggcagcggcggccaggcacggcgcgaggcgacgccacaggacagcggcggcagcaggaaatgcagcggcggccgcagcagcagcaaaacggatcggtggagaggcgccgccgccgccgggccgggcgtcgcgcgccgaggctcggggggagtcgtcgcagccgccgccaccgctaccgcagccgccgccgccgccgccgcccaggtgactgaggagagaggcacctcctcgctcccgccgccgccggacttcaatgcccagtccccagctcgccagcgtttttcgttggaatatacgttgcacatttatggcgattctgaatgtgagagcagatttctgccaggctgagcacagcgttttcgctgacaagtgagcttggaggttctatgtgccataattaacattgccttgaagacttctggacaccgagactggcctcagaaatagttggctatttatttatttatttatttatttatttatttatttatttatttattttgagacggcgtctcgctctgtcgcccaggctggagtgcagtggcgcgatctcag

SEQ ID NO: 403 - DNA, 48929 bp, Homo sapiens
aagtgcttttataaaagagaccccagagaggtagctctttactactaccatgtgaggacaaagttataagatgccatacagaaattagaaagtgggccctcaccagatctagatcttccaatgccttgatcctggacttcccagcctctagaattgtgagaaataaatttcaatcatttataagctactcagtttatggcattttgttccagctgtccaaatggaataaaatagtagatactaacaaatactagctcttgttatccttaacccttgtattttctactgatgataatgataattaagaatgtaagaattaaataactatacaaaacaaaacacaaaagaaagagaaaattttatcttcttaggacaatgtgtgttcatctctacctaaaagaaggttggtagactgtctttttggagatattgcttgttagtaatgaatatactatagtccataatgtaaggtatgcccattatcagtggagattttaacatgcttaagaaaccattatataagtccaaaatattaatttagttttgagaaatataacttttataagaaatagaatatttgcattaatatagtgagagtattttctttcagcaacctggccaaaagtataatcagaagaatgctaagtggacatagaatcaaatgagggagaatgagataaatcaatttgtaatatcatcaagctaataactccaacctaagggaaaaacttctgcttatggatgaaagtatcaaagtccgttgattacacaaccctttgcatactttcaccatcactaaatgcgttgttatcatttggctaaggctctctcccacaaagtgaagaggaatgggtactgtcacccctgcctctgtgactcttttttcttatttcaatgtatgtctagacatagactttcctcgaatgtctgcttatgttccttcagtttgccaagtctcttaggcttcatacttgttattaatataacatttcatacctttgcactatcatatttattgatttcatatttaaatttcagaataaagtaattttccactgttttcagacttactaggataatctcatatatgataagaataacaatgatgatgatacagaaccaagtttaaatattactccagaattacttccaggggcttgcaatgtcagtggatgaaatatgtgtcaaaaattggagcaaaataatgtttttcctaattaataagtgcatattctttttactttgaaatttcctgtatagatcatttcaaaggtggtttcccaaactcagtgagcaatcacagtacctgcttttaacttcttattgctgaaagaggcattgaagtgggtcagagagacagtcttgaatggtagacaccaatcttcccctatcccctggcagaggccatgcagcagtatggagagtctgtgtgttggaggagggagagtacagcatctgagggacattacattgaactcagtgttgcatgtcatagttgagaacaaagctgtgataggctcagccagtgcctgtgcatggtgggagcatttgaaccagccctagccagagaggaatcatctatcccagtggttgaaacttgagttgctcagcaagcctcgtcactgctagccaaagtgctctggggtccttggtagacttgaaaggcagtctaggattcaagaactacaattactagggaactccttgtgctgggctaggctcagagtcattaacctggaaagttactagccaggtggctaagggggtgtttgtctcacctcccggcaaaccccaggctgcacagctcacagcaatgaaagtgatttcttttttctgcttaagaaaaggagagagaagagtaaagaagactttgtattgcaccttggatattagctcacccatagtaggacagggcaccaggtaaagatgtgagatacccaccccaggccctggctctcagatgacatttctagacataccctagccaatcgagaacccagtgacataaagggaaggatccagtcctggcagaatttgtcacctgctgactaaagagtctttgtgtccttaataatcaatactcaggtagtatgcaatgcgccttgggctctaagatgtcctgaattcagctgtgatccaacacattcccagctgtggtgactatgctgaaagactcctacagtttgatgaaagcaggggagaaagtaaaggggactttgccttgcactttaggtaccagcttggccacagtgggttagagcaataatcaaggtcttagggtctctgagtctaggcctaggctcttggatagcatttctggacctgtcatgggccacaggggagcccactgccctgaagggtgagtctcaggcctggtagcattaatcacaaactgacagatgagccctgaggctttaagtgaacatcagtggtggcctggtagaatgccccatgggcctgtggtgctggtggccacagggaaagtctcctctgcctgtgggaagggaagggaaaagcaggaaggactttgtattgtggtttaaatgccagcttagctacagtagaatagaacaacaggcaaattactaagattttttactccaattcctggctcccaaatagcatttctgggcctgtagagaacctgggggagctcaccaccttgaatggaagaacacaaacctgtctggctttgccacctgctgatcacagagccctagggccttgagtgaacagaggttgtagccagttagtgattacagagcatcttgggagagacccagtgctgtgctggcttcaggtctgaaatagcggtggtggtgacaggggtgcttgtgtctctccaccccagttccagatggctcagcacagaaagagagactcttttgtttgggacaaaataaggaaaaagaacaagcgcccatctgataatctagagaattcttccaaaattctatgtctgtaactgtccagagaattcaaaatagctgttttaatgaaactcaaagaaattcaagataacacagtgaaggaactcagaattctatcaggtaaattcaacaaagagattgaaataattagaatgaatcaagcagaaactctggaattgaacaatataattgatatactaaagaatgcgtcagagtcccttaatagtagaattgatcaagcagaataaagaattaatgagcttgaagacagtttatttggaagtatacagccacaggaaatgtaggaaggaaaaaaaacaataaagcatgactacaagatctagaaaagaggctcaaagggataaatctaaaagttattggcattaaagatgaagtagagaaagagatagggatagaaagtttatttcaaaggagtaatatcagaaaacttcccaagcctaaagaaaaatatcaaccttcaagtacaagaaagttatagaacaccaagcagatttaacccaaagaagactacctcaagacatttgataatcaaacttccgaaggtcaaagataaagacagatttctaaaagcagcaagagaaagaaacaaataatatactccaatatatctagcagcagacttttcagtggaaaccttacaggccagaagagagtggcgtgacataattaaaatgccaaaggaaaaaactttgaccctaaaaaagcacatccagtgaaaatgtccttcaagcaaaaaagatgaataaaaactttcccagacaaacaaaaaaaagatgagggcttttatcaatgccagacatgttctacaagaaatgctaaaccaagttcttcaatctgaaaaaaaggacttaaatgagcaagaaagaatcatttgaagatacaaaactcactggtaatagtaagagcacagaaaaacacagaatattataacgctgtaattgtgatgtgtaaacatctcttaattagaaagactaaaccaatcaaaaataataactacgactacttttcaagatgcagacagtacatgaagacatcaagagaaacaacaaaaagttaaaaattgagatgatgcaactaaagtatacagtttttattagttttctttttccatggttgtttgtttatgcaatcagtatttagctgttatcagtttaaaataatgagttataagatagtatttgcagacctcatggcatccatacaatggatactcaaaaagtaaaaagcaaaaaattgaatcatactacaagagaaaatcacctttgctaaaagcaagacagaagaaaaggaaaaaaggaagataagatcataaaacaagcagacaacaaataacaaaatggcaggagtaataaaagacatttaaattaaaaagaaagaagtcaaattatctttgtttgcagatcatattttcttcttatttggaaatcgtaaagactccaccagaaaactattagaacagataaacaaatttgataaagttacaggagataaaatcaatatacaaaaatctgtagcatttctacatgccaacactaaacaattcaaaaaagaaatttaaaaagtaatcccatttatagcagccttaaataaatgcctaggatttaacttcaccaaacaagggaaagacctctacaatgaaaactataatacactgatgaaagaaattgaagaggacgcaaaaataaaatgatattccatgctcatgaatggaaagatctaatattgttaaaatgtacaaactacccaaagcaacctacagactgaatgccatctctgtccaaatgccatctctgtccaataaaaagaatgcccaacaacattctttacagaaataggtgaaatgagtctaaaatttatattgaactgcaaaagacccagaatagccaaagctatcctgagcaaaaggaacaaaactagaggaatcacattacataattccaaattatactacagaactataataattaaaacagcatggtactggcataaaaacagatgcatagaccaatggaacaaaatagagaacacagaaacaaatttacacacctacagtgagctcgtttttgacaaaggtgtcaagaatataccctggggaaaagatagccttttcaataaatggtgctgggaaaacaggatatccatttgcagaagaatgaaactataaccttatctcttgccacatacaaaaacaaaatcaaaactgatgaaagatttaaatctaagacctcaaattatgaaactactaaaataaaacattagggaaactattagaacattggtgtgggcaaaaattttttgagtaataccccacaagcacaagaaacaaaagcaaaaatggacaaatagaatcatatcatgttaaaaagcatctgtggaataaagaaaataatcaaggtgaaagacaaccaacagcatgggagaaaatatttgcaaactctccaaatgaaaagggattaataaccaaaatttataaggagctgaaacaactctataagaaaaaaatctaatgatctgatttaaaaatgggtaaaagaaaaaaataaaaatgggtagaagatttggatagatatttctcaaaagaaaacataaaaacaacaaacaggcttatgaaaagatattcagcaccattgatgatcagagaaatgcaaatcaaaactccaatgatacatcatctcaccccagttaaaatgacttttatccaaatgataggcaataaacagtgctggtgaggatgcagagaaaaggaaacattcatacactgttgggaatgtaaattagtacaaccactatgaagaagagtttggagccttctcaaaaaaaactaaagataaagctaccatataatccagcaattccacttcggggtatgtagccagaagaaagaaaatcagtatattgaagagacatctgcactcccatatttttttgcagcactgtttacatcagctaagatttggaagcagtctaagtgtccatcaacagatgaatggataaaaaaaatatggtacatatacacaatgcagtactattcagccataagaaagactgagattctgtcatttgcaacaacatggatggaatgggagatcattgcattaagcaaaacaagccagccacagaaagacaaacatcacatgttttcatgtatttgtggaatctaaaaataaaaacaattgaacttatgagtatagagagtagaaagttgattaccagaagctggaagggtagtggagggttgcaggaggaggtgggaatggttaataggtacaaaatttattagaatgaatgaataagacctagtaattgacagcaccccaggtgactatagtcaaaataatttaattgcgcattaaaaaataactaaaaggggataatttgattataacacaaaggataaatgcttgagggtataaatattctattttttcatgatgtgattattatacattgaatgtctgtatcaatatatcccatgtatctcataagtgcattcattatttgtgataacaccaaaattaaaagttaaaaagcatctcatacttttctctgttgttatacatattctccaactaaaaatgatggtgggattatggatcaaaagattacaaggcaaaagattacagggaccatgtctttaaaattaaaactttcaaaatatgtgtaaatacttgctaatgtgagtatatgtcaacactatttacttctttcactggatgttagggaaaaaaggaacggggtggatccttctgggtaaaggaaaatagtttcactaaattcttgtctttatttcagaaaatgcctgcccttcaaggcagataagagagtatttttttaatatattttaagtctaattttccccttttaagtcaaattcttcttttctctttgggtgacattactgattattattatctccaatggaagatagctacatatatgaatggagggaaagagaagtcgtttggaaatgaaagactaacagaaaaagaactcatattatttgaacccaattcatttttactttgattcctagttacgaattctaattctatccaaccttagttttaagagtcttggcaaagaattgtaacacaggcaattttggcttcctgtatgccattcaacctgctgtccattctgcaagccatctttcttaattataaatctgactataaataacgcccctgtttaataatattctaaaataatttacactgtccccaggacaaataattactcctatatatttcatcagtacatctaatcttttcaaaccatacttcaacttttacattgcaaccatacaatttttttaattcccaaatttgtcttatcgttttgcactctcaattttggtgcgtgatttttcctcccccttataaaattctctttttgatataacaaatttatcataataaaagcatgcacacttacatgcaaacataagtctctgtgttctgttttcctgtcaatttttaacaccgttaataactcaaattaaactcctatttttcattgtaccaccactagtctctaaattgctgggagttctcactccactgttgcctgcacaaccctggaagtataaatttggaaggtgaggggacagaggctgacttaaggctgccagtgatactcccttcactatttcaaaaagtcgcataagtgatctcttttcttctctctccaattctgttcatgtgtcaattggggtattgtttatctatcacactcacttgggtttttttgtttgttaaatatacaaaagactgatacttaaatcattttttaataataaatataggtttgccactaaaattaaacaatagaaaagtttgtaaagtggaaaaggattatccacactctttaatttgacacaaggtaaccccaattatatgtttagcttgcatctttctgaattttttctatgcttttgtaaaacacttaatatattaccgattttattgatttccttaatcattggcttcctagtatccttgacctttgcttcaaccctgtaacagtcttatgacttggttttggccaacataatgcagtagaaggatctcgtgcaattcccagctcaggctttatgaagcctggtgctcttcttcctcgtggacacctgaacctaaatgaggacgagcctgagccacattgctggctaataagacacatcatgtggaaaagagcccagctgccccagccagccaaggtcattctagaccagccatgtgctttccaaacatatgagagatcccagcctttcagtaaagatgcctaccccatgcagaggtgatctcagacacatggataatctcagcagagtcaagacctacctagctaactggtaaccttgtgaacaatagcaaatgcttattgtgttaaactactgaggttttgggtgttttgatacccataaataaataactggcagacacatatttacctataccttttttccttatagcaccagtatcatatattatcaacaatttgctccatttgtttaatctttgcttcacaacataggacaaaccctttaaaaattcaacacattaaaattcaatactacctgatttttagaaatctataaattattaaaagtgtcaattcaatataattttaaatattttgtcaaagtaatacattcatgagacagtccatagtacagaaaagaatacaataaaaatcatatttcccagtacaactctccccacctttagtcccacatactagaggtaatttccttcaattatttttgttttgttttgtttggcagtaacatttggaattctcaataatgactattatacctctgtgtttcccgaaatatagaacataaacaatgccattgactacctgatatgaaaaatgagatgcagctcacttacatagccacatatctggtctattctacctaatatttgatgatgtcatgatgttcatactttttattgattaattgtggaacaataaataatatatttaatcctaatttcttctttcatcaatgttgctcagtagttaaattttctctatgtaagttgattaatgttgccctcataccttctcactttcaattatatcattatatttttgcaatttttatcgtagtaaaatgccataacaaaattacaagcttaacaattttaagtgtacagccaaatagtattaaaatacattcataattttgcacaacaatcacccatctacctccagaattctttctatcttgtaaatctgaaactttataaccattaaatgacacttcattttctcctgccctagcacctggcaatcaccattctactttctgtctctgtgaatctgataatctaggtacctcatataagtgtgatcatattgtatttttgtgtgtgtgaatggcttattttacctggcataatgtcctcaaagttcctctatattttagcatatgtcagaacttccctcctttctatgctaaattatattttattatatctatatacaatattttacttatccatttttcagtccatggatactttcgttgcttccacattttagatatcatgaacaacgttgccatgaatatgggtgtataagtgtatctttgagaccctgctttcaattattttagggatgtacccaaaggtggagtttctggatcctatgataattctagctttaattttgtgaggaacttccatactgttttccacagtggtgccatttgacattgtcaccaacagagcacagggttccgattattctacatccctgcaaacacctgttattttgtgtttgtttgtatgttttgatgggagtcattctaatgggtatgaggtggtatcttatacttttaacaccatcttctttcattctattgttggcggtaagtcacagccagtcgtcttcatcagccaagtatagatgttacatgagccataaaactcgaaaatctagttagtttcttccacttcattttcactcgtccaccattttcattgaaattatattgtctattagagaatctaaaaagatacagttcatacaatctaaaaagatacagtctttacttttattgaaataccaaatattgactatgcaagctatactggtaaatgtgctctttgatgttgacagaggagggctgggctgcctgtggtttcctgcagaagagagaaaggacagaaggtcaagatggttacccctcactgccttcatcccatccttcattatgattcttcttccatcttctgccatatgcttttgccatttccctcgacttccatctgtgacctctgtgtctatttagtgaaaagtactcaggaatatctttgtaaaacctaagttaaattatgtcacttctcttttccaaagcactggaagggtttcctatctactcagataatatttttttaaagatttaccatgtgatgttcaagcacattgtgatgaggctcctcactgtttctcctaatttgtctctgtcagttccctcacttgcattctcttttggtcacactatctcattgtagttctttttaaacctgttcagcatatttctgccccagggcatttgcacttgtattctgtgctggaacacctctcctgcataagaaccacatgattcactctccaactctgtgcattctttattccaatttcattatttcaaggcaggttttcctgaataaagtacctatagttgagcatgtattttctacagtcccataactgtggctgaatgtcagtaatgagacagccaagtaaaaagggctccctggcagaacctcccaccagactgtgcactgggaagaatgcacactggggtggagccttgggaagttcatgccatttgcagcagggagaagcctggcccctcctcttcctgggtggtacctggtattcaatctgcgaggcaggaagggcattagcaggactctggctctgtgaagggtctgtttcccatttttttccttttcacacaataaaccctgccctcctcacctttcagattgtctgtgagtctaatttctcatggtcgtgtgacaaggaccccatctttagctgaactaaggagaaagtcaacaacagtaatgtgatatgtgcactcagaggaccaaagccctgctttccccatagatagctcctgtgtttactctgttttgttcaaggtctgatgcactgtttggtaactaagtgtggcaggtgggagagaaacagagagagagacaaagagagggagtgtatgagagataaatgaacataattaataatggtaatatttgtacattattattttaataattactaacctaggactttcattgtgtattacattttgctgcaattttccttaccctttgattgattatatagttgagggaaactaaatgcatataagtagaataaaaaagagcaaataaatactcaccagactacatcaataaagaacactaacttgaccatataagcagtcagctgtcattggtcattgaacttcaccaccgatatagctctttcatttatttcaccctccaacaactctcaatacttacattttcaattgccaggaaagaggtagaaatctcttgtcaaggttgctcgttctatggtgggcatctgggctttagcctgtggaacttcaaatgatttctgtacctaaaagaaaaaacagtagatgagatatgagggattttgggttctcagaatgcatcttacaccatgaaccaggaaatgcctgaatgaagagagcttccagggttgataggaccaagcccatggatattccaactccttaacactgctactctacctcttagaattgacaccccatgtcatactgtacactttacatcaaaataaacactgcatgcctagtcaaggcttttcaacctccattttctctattttccatttttgacctacggatgtggaaatcaattaaatatcctttgggatatgctcatgagaactggatatggaagatttagtactttcaacccccaccaacgctgattcttcaatttaaggagaattaaatcccagaatcttgctttaaggcctgaacactgaacaactttcatgcccacaccaccatgctgacctctgaaatcttatgcatggactgatcaatgagatcctgcttaccgtaaatccaatatttctagttcttttcccaggaataccctcaaaagtacaatgtctaattcctaatcatccaaaaggatttaacttcccagttctctattcacagaaaccccatctcaatttatggtacaatcttctttaaacaccagtggtatatcttccttttcccacaagagttttactgttctctataatttttaatttagaaacaaccacactttcctgtgttaataccaatcctattttcccttaaaaagagaaggaacatttatctattcattcatgcatctatttattcaatatatattaattgaatgtctgctatatgtcaggcatattgaggtgctgagcaaatccccgccatcctgaagtttgcatattagtgagtaaatacaggtaaaaaacagacacataaataaactattaatatatgcttaatgggaggaggtaagaactgtggagaaaataaagtaggaaggatggggaataaggaatgtcccaagttgggcaaggagtagcaaaccttcccttctgccctttcccatggaaagagtgatttcttttttattccctgttacatgcctttatgaattctaccacaatctgtaattgcacatttttttgttaacccatattttcagtatccatatctctcacaaaagtgtgagtcctagatagtcttaagccatgcaagcctcatttacccctttgtcatcaggatgaagcccctcacctccatccagtttttattcatttagtaaattaacaaaaattatttcaaaatattttctattctctgaattttaataagttataacccaaaataggaagcttatagctgatattattttgttttactttgctcttcttctgggatatattgacattttctttctctaaagcagattttaaacacctgaatgacagaaatcaggtgccatactacttttgcttgcctgaaaaactgtgtcatttttattcgattagtgaataatgataaattctttctgagcaaataagtaaatgactagaaaaggaaatggaagcttaccttccgaaatatttccattaggtggcagcagcaagaatatttctggaagcatgtgatgagttccgtaatgaagatggagccccttgtgcggtctctccaggacacgttatctatgatgatacagcctggtatgccttgggctacgactttcactatgtttttgtttatatttttgtttttgcatagcttgagaatttacttgatagatttatggaaatcccttataaccaaacatttacttaggtttcacacagaggaaacagaaaagctggcaaaggttgaacaaaaaagacagcttgtaagtattgcaagagattgcatagtgattgtattttgattcttggaactaactttttattatggacctcatgttcattcactttgcttagaaaaggggacttgagaaataactggaattctttcactttacaaaggaaagaatagaagctcagaaggatgaataaacttttaggttcagtgaggaagcaacaaaaaactaccgtcgggctccaagattgtttacagattgcaccatgatgtctttcaccataaaataaacaaaatagatgaacacatccaaagtttcagttatagaagattaaaatatagaaaaatactgtataatatggtgccaatagtaaataatactgtcttatatacttaaaaatttgcagagagtagatcttatgtaaattatccttatcacacccttgcagaatgatgataataataaatagagagctggaggaatcttttggaggagagatgtttacagcatagatttgggtgatgattttaggggtgtgtactaatctccaaacttattgagttgcatacattaaatatgtacagttttcatatgtcagctatgcctccataaagtggtttaaaaataagacttgaaaatttacaacttggaaagagtaaaatagaaagccctttaggatgattacctagaggtgaaatacaaacgactgtttcctgtaattagacctaattagctccaccctaacatttcttaccttttttaaagctcattcacatttttatctggacacttaataacattgctctttgtaggatcaagtgggatatatgtagaagagggcttgaagttgatcgtttggaaagacagccagtactgggatccataaaacttctattcaaaatgttaaatggatttattaaaaaaacagcatccatcatctatgtttacatggtgtgtggcgaatggggttccttgtattgtattgctttaatatttggtatgcctttgactgtaaagtgtaacacttataataaaagtacagttttttaaaatgtgtgtgtgggagggggaaggaatctattctcacagcacacataagatcatgcaaaatatatagagagcacacaccattctctcagctcattgttgcatagggcctatcttgatttcatagaatcattcaaaggtggcctcagcacccccaaatttttgactgttactaaaagacacatacgtggtgttgaagaacagaaagcaatgaagtccttctcctcgtggatcttgcaaacagaatctgcctccaggttctcagatgactgtgaagagatgagtgccaaggatgctggagagtctctgacccagagttccccatgtttttctgtagagacatcaactttcttttttttttatgttactttaagttccagaatagaaatgcagaacgtgtaggtttgttacatagttacgcatgtaccattgtggtttgctgcacctatcatataggttttaagcccacatgcattaagtatttgtcttaaggctctccttccccttgtcgcccaccccccgactggccccggtgtgtgatattcccctccctgtgtccatgtattctcattgttcaaccctcacttataagtgagaacaagtggtgtttggttttctattcctgtgttaatttgctgaggatgatagcttccagcttcattcatgtccctgcaaaggacatgatctcattccttttagggctacacagtattccatgggatatgtgtaccacattttctttgtccagtctatctatcattgatgaacatttgggttggatcaagagacatcaactttttatacactgatgtgcctcacttagcatggctatcacaattgcccaccttgttatttttcagtgttctttctaactaatttcatacatacatacagacccacacacatgcaaacacacacacacattttgctttgtctctagtgtcattcaacaatgtgtaaattaatagtgaatttatcatgtcattaccagttttcagttaaattattgctgctttcttaaagaaacaaaacaaaatatacatcccaatagtcatgaggtaattggaagtcaggaataaaaagagggagagagaagattgacttaaatcccctcaagtttccttaactcccaactcattttcccttcaataattgtgaataaatagggtgcttgtatcacataataacttcagtttcaagtgcaaattcttcagaaaccacataatgtcaacatgtctgtaaatcatttacaaatcaagctatcatgtaaatgattccatttcaaagtttgaatatttctgtttaactttgatttagggattctgatgatctccttcaccacttccttcaccactatcaccgtggataaaattgtacagaaatttctccactgatgagacaatttctcattatatcagccccttaggtagagtttcttcataattcaatgtactttatttgcactggatggggtctaacattgtttcccctaaatataaaccaaacatcacaatcctctgcatacaccttcaaaactgttagatgttcagcctcagcactcaccacctctgcaggcctggacaatgatgaccttgggtttgtcctttagactgaggcagttgcggttgttgaatatctggaagatggtgtcataaagcagcacatccggttttttctttttatgcgcagttccgcagattccctctaggatgccatgagacatgagtaccaagaacgtgctgtcagaggacttgtgctctggtctggcagcaaatgccctcagcactgactccatatcctataaaagagcaatgtctaacttcagtcagagaagcatcacaattaataggacctcctagatttaccatgagcgaaacaagaaacatatgtaacatccgggtcgtggtgcttcacatagcgcttactcagtcatgacagcagttttatgtttttttgttttgttttttttttcctttgtaatggggctgtgggttcctactttttctccctgctgacacaccatacactgtcttcttaatatattgtatatttttatatgttacttatattacttttttttatctcaatcttttctctcctttcctaacaagagtcatgtgttataaacgcatcacaccactgtccttgtaaaacccaacatacgttgcttagaataaaatcaatcttctggcctgaccatactcatccttatactatgtctgttctgcttcaatctctagtcacactgatctgttgtgcctcacatgtgccagtttcattttcagctcagctctttcacaggtagcgccccctactgggaaggcgctgcattctcatcttcccagagccattccattccttccggtagtgccgtccaactcctgtgttctctccccacagaggcttttctggaccaacccaaaaacatcgcaccccatccaacattctctctcatgtttcctttttgcttactttggattctcttgttattcttatatagacacatacacacactcattatctgaaattgtccggtttcgtttatattgtgagattttacctccactctaacctagatccttgcaatttgaaacttctggtatcatttacagacttatccacagtatcaggaaaagctcttggccccaaagtttggatttaatatttgttttaagagtgcattcctgggccgggtgcggtggctcacgcctgtaattccagcactttgggaggccaaggcgggcagatcacgaggtcaggagatcgagaccatcctggctaacaaggtgaaacctcatctctgttaaaaatagagaaaattagccgggcgtggtggcacgctcctgtagccccagctactcggtagggcaggagaatcgcttgtggaaggtgaatgttgcagtgagccaagatcacgccactacactccagcctgggcgacagagtgagacttggtctcaaaaaataaataaaaataaaaatagagtgccctcctgcctaaaacacattactctgtgattttatgtggaatcttggggctacatcccaatcacctgatcttattggaactcagtaacaattgcgaaaatacatgccaatcatattttgtctagttttatggagttgagggtatttgaggctcaaaagagacactgatttatgtgttcaataatttcatttgctagtgcatgtgcgcatgtacacacacacacacacacgcacacgaacccagaggttgttaaaccttgttgaacttctataaagctaactaattattagaagaatctgtgttgcctatggatgagtgtgagatggcttaggggttcttaccctggctgtgagattcttttcgtcaaccacagtgtagcccaggccttgaagcagccttttcatccccacgatgtcatagtgagccccattccttgcaggcaggtgatcaaactttgtattgcatatgatgagagccaggcgtctgcggtcctctctcttttttattggatagatctgcaggagatggagatgaagcaactttgattacccgagtctcttttcaacccccatatgcctcacaattttgcttttttaagacctcatgcagctgccaccttccctaacctctatcagaagacactgccttcctctctctcaagagcccagagcaagaaccaggacatatctggaatgatcactctagaatcttgaggaaactagaataattcctacccccttccttctcctttttcttctccacctactcaaacatttcttatatttaggttcaaatcaaatttcatataaaccaagaggtgttgtcatcggctccagtaaaaataaatatagcaaattttctttgccttccgtattatgattattttggtactattttaaaaacataaacttacaatgattttcaagatttaattatacttttcaaatatattttatgtctaggcttttcaactgggtataaacaattactactcagccatgttataaacattttattttgtggctttatctgaaattgtaataaatcccaaattgatacaaaaatcaataaatgataaaaaagagaaagctacattttatcatggattgaatgagcactggtatttgtttgaagccatatgaacccttgcctgctgaaagcatctatcataaaggttaccactgtcaccaccccctcatcatttagtgctttaagtatttgtgcatttatggctggcactgtggttcccgcctgtaatcccagtgctttgggaggccaaggctgtggatctcatgaagataggatttggagaacagactggacaacatagggagactatatctctacaaaaattaaaaaaaaaatcagcctggcaaggtagtgtgcatttgtagtgctaactacttgggaggctgaggctggagaatctcttgagcccatgtgttcaagatagcagtcagctatgatcacaccacagcactccaggctgggcaacagagcaagaccccatttttaaaaatgtgcattgcatttaatgaaagcaattgtttctctcttcttccccatttcatacagagagcacagcacctcatcatgattttttttacacagtctcaggaattcttcacgaggacaaagtttgagtatatttgtagattctgctgactcaggtggtccagcctcgatttgcagaagagctgtgggatatcacaaaatataaattatggtttctgcctctgtgacccaatttatcacctaagaactttgagagagagagagagagaaatcctaggaaaaagactctttatatttaggggttatagctgtacctaatttccagcttaaggaaatgtgttgtgagaattccctgatagagaaagcagactcccacaaccccaccaagaagaagatgcaactatagattccgattattctggagaaaaaatcttgatgatttaaagttaaatttggcttttctatattcagaaaaacagtttgatttttccagtggttttacgctagggtactcattcatttatttggactttctgctgtgtctgggcaagagtgtgctaagtaaatacttgtcagagtgctatttgaaatacaatgtgagttccatatgcaatattaaattttctaatatcacatttacaaaaggtaaaaataattgtaataatatatttatttaacataatatattcaaaatattattatttcaacatatgtcactagccacaagttatgtctggtggctacaaaagtggatgggacaacatcccattttggattgatagtcccctcctagttcacaccacatacagatacatgtatacaacaaacgtttgatagaatattgaatcctgtaccatcctggtattttttaagcaacttttatgtgaattaataattattctagaagaaataagcttcagttatctttcaacaaattgtgaaatcacctatttatgaagaaaggttgtctagtgacaacacagtacacaatagtactgtgtccaaggtcaaagggacaaatatttgtatgagattctgacgtaactctgaacatcttgtctctaaactgctggacagccaacactgtccaactcatattttataatgtgaggaaataatacatctgttttggataagtttgcttctgagtaattctgatctatccccttgtgaaatgtaatattgatctcttttgaccgatattgtgcaaaaaactgggagattattgagccctccttctggaaaagaaaaaggaatttatgtatacaaattcaaagaagaatttagtaagatctaataacaagatttcttttcatgaaagaaatggacaagtatacttttatgtttggttacgtgacccaaccaagacataggaatcatgagtaaagtaatattgttctgtataaaatttatattgtttttaaatatttcatgtattttttatatatcaatcatttgtttctcttcatttttaataatattttaaagtaaatgtcttgctaaagagtatgataaaagcgtgagttctgggaatgcaataagttctaagtgtgtaaggaaaccataccttctaagcatctcttttttcatagattaaacagtgacagatgctttttcttctcatttcagaaaagtctgccaatgtgaagacatctagggtcctgggatattactggtctgagggtatgttttcctgtttaaaggtttggagaacttccaacttaacagtcatctcctaagacttttatgtgtctgtgtgtagaacaggtgttttccagtaaaattagaaattagacagaaattctatcttatatccagtagtagaattagtacaaaaatattattttattacaaaataataaatattatagtgcagtctccttccaaagagagtttctattagcctggcagtgcaacaggaagtaatgtggaaatcaggagtttagataaaaatttcaatttgagtcttatctattatctaatgaaacaggaatctctcaggaatctgctcaggaatctcttaacattgacacaacaagaaagggagtagtggagtggtacaggatcagtaaagcaatttcccacagcacatagggacttaggtggttatctcctgactaaatcagatcatcggtatatagtgtgtatatatatatgtgtgtgtgtgtgtgtgtgtgtgtgtgtgtgtgtgtgtgtaaacagttaaataacaaatgaatagctaggattcttcttatcctgcactccagaatccaatgctttgttggaaaccctcataattataaccatatccaaaggcctagccaaggcctgtacctcttctaatagcccagcccacccagcttcctggtctgctgtgccagtgtactcaaagtattctgggatcgatcattctggagaatacaaatgcagatagagtgcagagagccactggacccctcctgcagggatctgcagctgcctccttcttgccacagcctctgctgatcagataggctaattcagtttagagtttagtgctcatcatatatgatatctgggattgctaaaatcattttgaagcccgtattgctacaaatatgattcctatttgttgcattatctctgatttttaaaaaccgatattttttcctcatgccattccaggtttgaggaaaaggaaaatacttgcaaaagaccagtttaaatattaataagaatgcatccttgcctaaaatcttggacaactatactagcatgtggtttctgttgaggggaaactttccccacagagaaggggagtttattttgtatagtgaggtttgaacaatttatgttgctttatgttcatgatcgtatgtgattattggtaagctgtagtagttcagggctgaagatttcagtttaaagtctatggcaaattgagtccttccctggaaaacatggatctgagaacatttaggctctaataatactgataattcaatccgtgtcaaaagttttgaaatgttataaaatttaaacattttatagtagttccctgatcataattttgtaactcacagaaatgagtaagcattggaaaattccaatttgtagcgcccaaataataattaagaaagcactctttattgcatgcgtatacttcatttgtttattcatcacacattaattaggtatctgctatgtgccaggatctccattaattactcttattaattggtgaagaaaccagttacattctggtagcagaaacttggtgcatgttacttctttttactgaagcggaaaagggttaaaagtggagcacgtttattctggaaaacaaagcatttaattttagctgtattcattttgtgatgccagtgaaacactggagcagaattgttttatatgccgctagagctaaatgagtctggagctcagatgagagagtcctgaatgagagctggtatcttggaagttgttggcatgtggtgcctggcattacaatgtttctggctgtagacagtcttgtgagaaagtgctggaattgcccacatttcacaggtggtaagactgatgactagggagaatggaaggtcaagaaacttgcatgaagctgcatagttcacatgtgacagaatctaagtttgggtttaggtatctcctactaaaaaatctcccttattaactatttctgtgcacagtctaaacacaaggacacagctttttggctaattggaaatttgatcccgtcccataaaagacaaggtggtctctaacaggatgatgacatgtttactgaaaatgagagtttagaaatgaaactgtaggtagatcacagataacactgcatgggccttggagttgaatatattctggaaaatttaacatatttatcgtgttagatgcaaccttacgttttacactggtgatcttttggtccatattgagaagtgtttgggtaaacatttgatgagccacgcgattctttcgcaaagagtctaccaagatcagggccttgtcttcaattttggtatcataatattttttcttttcctcttccttcaatgtcagaacatcgtgttttgccaaataattaaaaacaccatgaagaacatctttgcccaggtattccaacatcttaactgttttttttttgtggttgtcttctgtcagaaatagaaagactcctttaactatgggcacagcttaaagagttctgccttcacctaagacataactctgtaatatgaaactcctctaaaaatacattctattttaccatgtctccagcgaataacacacatctttttttgcaactgcagaattctctcacctatcaaattcataccagactgtgcttagcaattcatttcctcttaaatttgtttttatagcttttcttcttccttctgtggcattgggaataatgctaatttcctggtcacctgctgctttcatatttctctttctcttgctcacagctcatgatgatgataatttacctgaaatggacactcccaggacagtccatgctcttgtctagactgtaaatactactagactatacaatcttgcctctttgctgtatttagtttccttggggaaagcactatatctttgaatttgcatttttagcacacatcctatacccacatctttgtgctcattaacatctttgtgcccaaaatgcttaaaagtacttagcatgcttgctaaatacatgacttaatgaacaaatggatgactgcacccagagtcctaattttttagcatcttttcctcaatcaaaatttgaaattgaaaataatatcataactactctagcatggtgaatttatgtgacatcaggttaatcactacaccttagcataatttgaatttttattggaaaatatagatatcaaagtgataaatttttttgcctggccctcttctaattactgccagtcattggtaaagcaaccagttgcattctggtgggagaaatttgatatatattagtttcttttactaaaatggaaaggggttaaagttggaacaaatttgtttagaagaaaaagtgtttaatttttaggtaatcattagtttaatgaagccaatgaaacactggagcagaattgttgaaaatacatctagagctaaatgagtctggagctcagaggagagagttctggatgacagctaatatcttgggagttattggcatgttgatgccagccaacacaatgtttctaaccttccacagtcttgtgagaaagtactgaaattgtccccatttcatagatggtaagactgatgattagggagcaagagaggttaagatacatgcaggaagccacacagattattagtaacagaatctagatttaggtttgaatatgtcttactacaagcctctactattaattatttccatgcacaatctgaacccaaggactcagccttttagccgattggaaactggatcccaccccacaaaagacaaggtagtccctgaaggaaaaattataggtttggtgaaaatgatagtttcataaaggaaggaggatagggggatcacagaagtcactgcatgggacttataattgaacagattctaaaaaattggaaatatccattgtaaaatatccagtcttactttttacactggtcgacttttgatccgtattaggtactagggtctggatagatgtttgtccagccacgttgttctttagcatgtggtttatcacgaagttatccaatccactctgaaggatacctttgaacatagcttcaaaattcttacgccttttttttttgccactgtcttctatcagaaatataaagactccttcaactctgggcacagcttaaagagttttgcccttgctttagacaaagctctgtaatgtgaaacacccttgaaaatacattctgtcttaccatgtcttcaacaaatactcattatttctttgtacctgtagcattctctcacccatcaaattcctaccaggctgtgtttaacaattcattgccacttaagtttgttttttatagcttgtctttttcctttctgcagcattgggcctaatgctaaattcctggtcatccattgtattcagatttctctctcttgctcaaactcatgatgacctacctgaagtgtgtgcacccaggacagtccattctcttgtctagactgtaaattattcctactagactgcaggatctttccttttctctgtatttagcttccttggtgaattaactatatctttgaatttgtgttttttaacacacaagctatacccaattgtgctaattaacaattttctgctcaaaatgcttaaaagtgcttaatctgcttgctgaatacataagtaaacatccaacttaatcattaagtggataaatgcatctagatacctaattcttcagcgccttttctcaaaccaaaatttagaattgaaaatatttaacaaatattatggtagattaatataatactgagttaatgtattactccttggtataattcagatttttaccaggagatatatatatacacacatatatatatatatatatatatatatatatatatatatacacacacacacgtatatatatatatatacacacgtatatatatatatacacacacatatatatatacacatatatatatacacatatatatacacatatatatacatatatatacacacatatatatacacatatatacatatatatacacatatatatatacacacatacacacacacacacacatatatatatcaaagtaataaatcacttatttcaatacaagagatatgatttaagcaggttgtatgtggaaaagccagatatctcctctcttctgttaactctataaagatcattatctagtttatctaaatataaggatagctttcacacaaaatacattttctaaagaaaacatgtcaggacattgaacaaaattttggcctagaagcaccagactcattttccaggttatcttgagttcatatgccaataatgaaccaaccattattagaaagacacatggaagttacaaaacaggacaaaaagttacatttaataaatgtaacatctcctatgtattttttgtgattaaaaaatgaattcacataaagcaatgacaatcatcattatatcatgagtaattatcattattattaacaatatcagtaattatcattattataatgatttaatcagtaattatcattattattatactcatataataaatcagtaattatcattattatactgatataataaatcagtaattatcattatactgatataataaatcagtaattatcattattattattatatcatatcagtaataatcattattatttacaagtctctcttctaagtactttacaaatagtagtatactggactctcacaataaaccagtagaatatttattattttatcaattttataagtcatttaaataataggctgccctaaatcacatgaattagggttcaaatcctatttttacaccacattccatagagttaaccatgacaggctttcagtaataataatatatgttgaacccccatgaggtcaagtgctttactgaaatttcacaaaaactccatgcaaaatgtatattaacctcttttatatggaaaaggaaacatatacagataagttacttaagaaattgagtgtaatcctgtgaaaagaaaatgaagtatacagtaactccggagcaggaatagaagtacaagtgatcagaatccagagccccaactcttaagtcatgaaactacattacatgatagttgttgaagagcttcttaagagaacacagataagatgcttaaggaactcagaaaagatgagaaaattccaggaggagagtttacagaggcttcttagaagacaagacaaaaacgttggttttaaatgcaatgtagatgttggaacagggaatgtgaagatttgcaaagagtacacagattagttaatggaatgtctactctgcctgagttctgaagttctatttaacttacttgcatgcttagtaaatgaatatagttttgactgaatgaatatgtggagacatgtgaaaagcaattaacctaaagaggtttacaacacaataaatgccacttatagaaaacacacagttaacatcatactcaatggtgaaaagataaaagcttttcttcaaagattaggaagaggacaaacacacccactttcaccgcttctattctagaaatcctaaccagaggaattagacaacagaaagaatttaaaggcatcaaaataggagaggaagaagttaatgtgtcctgtttatgaatgacatgatcttacatatattaagaaaaccctaaatgctccatgaaaaatctgttggaactaatacacaaatgcagtaaagttgaaggatacaaaaacaacatgcaaaaattagtatcatttttataacaacaaactaaaaaattggatgataaaaatctcatttataatggctataaaaaaatttcatgaaataataaggaataaatgtaaccaaaaagttaaagatgtatatactcataactataaaacattgacagaagaaaatgcctgagattcacaaaaatcaaaagatatcccgtgttcatgaattggaaaatattacattattatgtctatactacccaagaaatctatgaattcaatacaattcctattaagcctccaatggcattttttacagaaataggaaaatcaaccttaaaattcatatggaattatttaaaaattcaaatagccaaagcatccttgagtaaagaacaaaactggaggcagcacacaacctgactttaaaacatactgcaaagttataataatcaaacatagtactggcataaaagcaaacacagagatcaatggaataaaacaaaaaggccagaaataaacccagttatttacagtaaatttatttttgacaaagtttcaagaacagacaataggctaaggacactttcttcgataaatgatgttgggaaaattaaatatccaagagcagaagaatgaaaacgggcccttatctgccaccatatacaaaaatcaactcaaaatggattaaaaacataagcctaataactgaaactttgaaactactacacaaaaacgtggaaaagcttaatgacactggtatagacaatgatttttggatataacactaaaaatatgggaaaagaaagcaaaattaagatatgagattacatcaaactaaaaagcttttgcaaagccaaggaaacaacagtgtgaagagataaccaacagaataggagtaaatatttgaatccatatgtctgataagatattaatattcaaaatatatgagaaacacaattcaataggaagaaaacaaatattacaaaatgagccaaggaccaaaatagacatttttcaaaggaagatgcataaatggacaacaggtctatacaaaatgctcaacatctctgatcaccagggacattaaaaccacaatgagataatgcctcacacctgttagaatgattagaatgggtattataaaaaaaaaagataacaagtgttggaaaggatgtagagaaaaaggaactcttgtatactgttggtgaaaatataaattagtacagtcataatgaaaaacaataggaaactcctcaaaaagttaaaaattaaaatgaattaaaaatgttaaaaatgatgtagcagcccaaatatttagtatatattttaaacattaagtcagtgtgttgaaaagacatatacacttccattgtgattgcagcattattcacaataggcaagatataaaatcaacctaagtatctgtagatggatgaatggatggagaaagtatcataatgcaacagtattcagctttagaaaaaagaaagaaatcttgtcatttgtgacaacattgattaacatggataacattacattaaataaaataagccaagctgggcaccaaaaaacaaatactatatgatctcactgatgtgtagactcacaaaagttaaacacataaaagcagagggtagaatggtggtgattaggaggaggcaggaagtttggggagatgttgatcaaaggaaacaacatttcaattagatcggagaagtaagtttaagaaatctattgcaccacatagtgactatagtcaatgatgaattcttgaaaattgtttgacagtgtaaattttaagtgctgtaatcacaaaaaaagatgagcatatgaggtaatgcatatgttatttagctctttaggcattctacaatatatatttcaaacatcattttgtacataagtacataaaatatttatttgccaattaaataaataaaataatatttataaaaaacaattcaagacatttggcttgagagcctcttttcataatctataaattctcatagcatcaattataagtttaaaataataaataaatgactcaaatttatggatcagcccagatgtggatcccgtatggaaacccatacgtccaaaaatgagacgtcacttaaaatactcccacaacctcattcaattgaacttttaaaattgaactgctaattttcttctatttccatccttcatttgctcctccatatagtaaaaaataatacctaacttccaagtgcgggaaggcagcaaaacctggtgatattaaacttcttctgccttctgtatgtcttattccccaactcaattcacactgcattgattttatttactaaacattttcagaatctgaccactactcttaattttaattgttcattacttctattcaggccaacaccctttctttctgaattacaccaagaaccttataaaccttctttttgtcctttctattctattcttcacaataaagagtgttcctatatctagatttgaccatgaaacgtctcagcttattctaacctaggccttctcattcagcctcatcttctgatactgtccccaccttgctcattacaattaaaatattctgctcttcatttaatgtctagtccagtctcccaccttctccttgcttcctattctcctatactttctgttcattctccaagtctaagaccagatggcatttttttttttcaggcaatcctctgattctctgaggggagacaatgtcagaggtacatgcccctagggcaccttgtttctctttagggtagcatagttttttacctttaattgtgatttccagcctaattctcagcatccaccattagattttatgctctgtgaggataggtggccataaactaggcctgcactacttctggcactcaagggaagtctaataattatctactgaatcactagttgagtgaatgtagaaacaaatgaataaattttaggtatggcccaactcttgaagaatatttaataaaaggtaagtaagtttgattttatttaatagacaataagcacacactggaagttttaagcagaaggaaggcatattcattctggaaaatttggtgagcaaaagtttgtgaaaaatactctgctagttgtgagggtaccattttgaggaaatgttcttacatgttcaagcttacagtcaagtggaaagatagatatgcaaatacatcaaataaaaaacattgtaagaatttaaataacgagcagatgctcaaaaaaaagcatgagcacactgtgtttcaggtagaagatagctgtccagagaagggagggcttggcactgagacctgaaagactaggaggaatttgccccttggacaagtgagggctggtcccctaacagagagcagtgtgggaagaaacacaaagattttagggtgtctaaagtaatcaggaagctgggctagctgggctttagaaagtattgaagtgtgcagccaggactgaagtgggcgtgatgagatagggccatcatttgaagatgtttgtttgcagaaaattgacagaacattagagtgttgagtttaagagtcaggccaacctagattcactcttctcaacagacattagaccaaaagaaaatttcgtagtccttttctagacaccttcctcaactataaaatggcaataatagcacaaacttaactgactggttttaaatattcagtcacagagagtgcaagagataccgatcacacagtattatttttaaaaaacagtttttattgattactttttgttattttagtaatcaatgaattgaagatgcagtgataataaaaacgaatggaataatttagaggccaaattcatcaagagcagttttggtcctaggcaaagtgatgtgatgttcttacacattttatataggatactgtttttcactagttttatttaacaaagaccaactacacatggttgtttataattattaacccacttaacttatttttgattagtgctcttcaatttctcctatctattatctaatgattctcctgactccagtctacgaccagtaaagtcagcctgcccggccaaagaggcagccatggctatgaatttgacttactcctccctggccaaatgctttttagtatcataaaatagacaaaaaaaaaaaaaatttaaaagcaagcaattcctgcattttaggagtttcagttaaatgttgtgaggtgagatgtaaaccttggagataattaagctagtgggagaatcgaataaagaaactcaacagcaaggaagtacaagtgaagtaaaatacagtaaacatttgcttctttttcttatgaacgtaaaaatcgtgccttagagtgattaatggaaaaatgaataagtatattttgaaagacagaaacaccatctaaaacactatctgaaagtttagatatttttaaaaaggcaatagggagccaatgtatgttgctgagtaagaaaattacattaatagatccctagcatgtgagaggtgagagttaactaactgaccacctttgctaatgatgctaacctgcagaagaacctgtgccaggctagcttcataagaattgtctgcagatctttaaaggttaataaatgcctacagtctgttaaagattgagctattcagggttgggaatgcagtggtaatctgatttttaaatatgactgcagggggaggcgccaagatggccgaataggaacagctccagtctacagctcccagcgtgagcgagcagaagacgggtgatttctgcatttccatctgaggtaccgggttcatctcactaaggagtgccagacagtgggcgcaggtcagtgggtgcgtgcaccgtgtgcaagccgaagcagggcgaggcattgcctcactcgggaagcgcaaggggtcagggagttccctttcctagtcaaagaaaggggtgacacacggcacctggaaaatcgggtcacttccacccgaatactgcgcttttccaaccggcttaaaaaatggcgcatcagattatatcctgcacctggctcggagggtcctacgcccacggagtctcgctgattgctagcacagcagtctgagatcaaactgcaaggcagcagcgaggctgggggaggggcgcccaccattgcccaggcttgcttaggtaaacaaagcagccaggaagctcgaactgggtggagcccaccacagctcaaggaggcctgcctgcctctgtaggctccacctctgggggcagggcacagacaaacaaaaagacagcagtaacctctgcagacttaaatgtccctgtctgacagctttgaagagagcagtggttctcccagcacgcagctggagatctgagaacgggcagactgcctcctcaagtgggtccctgactcctgaccccccgagcagcctaactgggaggcaccccccagcaggggcagactgacacctcacacggccgggtactccaacagacctgcagctgagggtcctgtctgttagaaggaaaactaacaaacagaaaggacatccacaccaaaaacccatctgtacatcaccatcatcaaagaccaaaagtagaaaaaaccacaaagatggggaaaaaacagagcagaaaaactggaaactctaaaaagcagagcgactctcctcctccaaaggaacgcagttcctcgccagcaacggaacaaagctggatggagaatgactttgacaagctgagagaagaaggcttcagatgatcaaattactccgagctacgggaggacattcaaccaaaggcaaagaagttgaaaaccttgaaaaaaatttagaagaatgtataactagaataaccaatacagagaagtgcttaaaggagctgatggagctgaaaaccaaggctcgagaactacgtgaagaatgcagaagcctcaggagccgatgcgatcaactggaagaaagggtatcagcgatggaagatgaagtgaatgaaatgaagcaagaagggaagtttagagaaaaaagaataaaaagaaatgagcaaagcctccaagaaatatgggactatgtgaaaagaccaaatctacgtctgattggtgtacctgaaagtgacggggagaatggaaccaagttggaaaacactctgcaggatattatccaggagaacttccccaatatagcaaggcaggccaacattcagattcaggaaatacagagaatgccacaaagatactcctcgagaagagcaactccaagacacataattgtcagattcaccaaagttgaaatgaaggaaaaaatgttaagggcagccagagagaaaggtcaggttaccctcaaagagaagcccatcagactaacagcagatctctcggcagaaactctacaagccagaagagaatgagggccaatattcaacattcttaaagaaaagaattttcaacccagaatttcatatccagccaaactaagcttcataagtgaaggagaaataaaatactttacagacaagcaaatgctgagagattttgtcaccaccaggcctgccctaaaagagctcctgaaggaagcactcaacatggaaaggaacaaccggtaccagccgctgcaaaatcatgccaaaatgtaaagaccatcgagactaggaagaaactgcatcaactaacgagcaaaataaccagctaacatcataatgacaggatcaaattcacacataacaatattaactttaaatgtaaatggactaaatgctccaattaaaagacacagactggcaaattggatagagtcaagacccaccagtgtgctgtattcaggaaacccatctcacatgcagagacacacataggctcaaaataaaaggatggaggaagatctgccaagcaaatggaaaacaaaaaaaggcaggggttgcagtcctagtctctgataaaacagactttaaaccaacaaagatcaaaagagacaaagaaggccattacataatggtaaagggatcaattcaacaagaagagctaactatcctaaatatatatgcacccaatacaggagcacccagattcataaagcaagtcctgagtgacctacaaagagacttagactcccacacattaataatgggagactttaacaccccactgtcaacattagacagatcagcgagacagaaagtcaacaaggatacccaggaattgaactcagctctgcaccaagcggacctaatagacatctacagaactctccaccccaaatcaacagaatatacatttttttcagcaccacaccacacctattccaaaattgaccacatagttggaagtaaagcactcctcagcaaatgtaaaagaacagaaattataacaaactatctctcagaccacagtgcaatcaaacgagaactcaggattaagaatctcactcaaaaccactcaactacatggaaactgaacaacctgctcctgaatgactactgggtacataatgaaatgaaggcagaaataaagatgttctttgaaaccaacgagaacaaagatacaacataccagaatctctgggatgcattcaaagcagtgtgtagagggaaatttatagcactaaatgcccacaagagaaagcaggaaagatccaaaattgacaccctaacatcacaattaaaggaactagaaaagcaagagcaaacacattcaaaagctagcagaaggcaagaaataactaaaatcagagcagaactgaaggaaatagagacacaaaaaacccttcaaaaaattaatgaatccaggagctggttttttgaaaggatcaacaaaattcatagaccgctagcaagactaataaagaaaaaaagagagaagaatcaaatagacgcaataaaaaatgataatggggatatcaccaccgatcccacagaaatacaaactaccatcagagaatactacaaacacctctacgcaaataaactagaaaatctagaagaaatggataagtttctggacacatacactctcccaagactaaaccaggaagaagttgaatctctgaatggaccaataacaggatctgaaattgtggcaataatcaaaagcttaccaactaaaaagagtccaggaccagatggattcacagccgaattctaccagaggtacaaggaggaactggtaccattccttctgaaactattccaatcaatagaaaaagagggaatcctccctaactcattttatgaggccagcatcatcctgataccaaagccgggcagagacacaaccaaaaaagagaattttagaccaatatccttgatgaacattgatgcaaaaatcctcaataaaatactggcaaaccgaatctagcagcacatcaaaaagcttatccaccatgatcaagggggcttcatccctgggatgcaaggctggttcaatatacgcaaatcaataaatataatccagcatataaacagaaccaaagacaaaaaccacgtgattatctcaatagatgcagaaaagttctttgacaaaattcaacaacgcttcatgctaaaaactctcaataaattaggtattgatgggatgtatttcaaaataataagagctatctatgacaaacccacagccaatatcatactgaatgggcaaaaactggaagcattccctttgaaaactggcacaagacagggatgccctctctcaccactcctattcaacatagtgttggaagttctggccagggcgatcaggcaggagaagaaaataaagggtattcaattaggaaaagtggaagtcaaattgtccctgtttgcagacgacatgattgtatatctagaaaaccccattgtctcagcccaaaatctccttaagctgataagcaacttcagcaaagtctcaggatacaaaatcaatgtacaaaaatcacaagcattcttatacaccaacaacagacaaacagagagccaaatcatgagtgaactcccattcacaattgcttcaaagagaataaaatacctaggaatccaacttacaagggatgtgaaggacctcttcaaggagaactacaaaccactgctcaaggaaataaaagagggtacaaacaaatggaagaacattccatgctcatgggtaggaagaatcaatatcgtgaaaaatggccatactgcccaagataatttacagattcaatgccatcgccatcaagctaccaatgactttcttcacagaattggaaaaaactactttacagttcatatggaaccaaaaaagagcccgcattgccacgtcaatcctgagccaaaagaacaaagctggaggcatcacactacctgacttcaaactatactacaaagctacagtaaccaaaacagcatggtactggtaccaacacagagatatagatcaatggaacagaacagagccctcagaaataatgccgcatatctacaactatctgatctttgacaaacctgagacaaacaagcaatgcggaaaggattccctatttaataaatggtgctgggaaaactggctagccatatgtagaaagctgaaactggatcccttccttacaccttatacaaaaattaattcaagatggattaaagacttaaaagttagacctaaaaccataaaaaccctagaagaaaacctagacattaccattcaggacataggcatgggcaaggacttcatgtctaaaacaccaaaagcaatggcaacagaagccaaaattgacaaatgggatctaattaaactaaagagcttctacacagcaaaagaaactaccgtcagagtgaacaggcaacctacaaaatgggagaaaattttcgcaacctactcgtctgacaaagggctaatatccagaatctacaatgaactcaaacaaatttacaagaaaaaaacaaacaaccccatcaaaaagtgggcgaaggacatgaacagacacttctcaaaagaagacatttatgcagccaaaaaacacatgaaaaagtgctcaccatcactggccatcagagaaatgcaaatcaaaaccacaatgagataccatctcacacgagttagaatggcaatcattaaaaagtcaggaaacaacaggtgctggagaggatgtggaaaaataggaacacttttacactgttggtgggactgtaaactagttcaaccattgtggaagtcagtgtggcgattccacagggatctagaactagaaataccatttgacccagccatccctttactgggtatatacccaaaggactataaatcatgctgctataaagacacatgcacacgtatgtttattgtggcattattcacaatagcaaagacttggaaccaacccaaatgtccaacaatgatagactggattaagaaaatgtggcacatatacaccatggaatattatgcagccataaaaaatgatgagttcatgtcctttgtagggacatggatgaaattggaaatcatcattctcagtaaactatcacaagaacaaaaaaccaaacaccgcatattctcactcataggtgggaactgaacaatgagaacacatggacacaggaaggggaacatcacactctggagcctgttgtggggtggggggaggggggagggatagcattgggaggtatacctaatgctagatgacgagttagtgggtgcagcccaccagcatgtcacatgtatacatatgtaactaacctgcacattgtgcacatgtaccctaaaacttaaagtataataataataaataaataaattaaagaaaaaaaaagactgcagattattcatatatgttataaggtttagaaagcactgatctattccagtttcttcctttttccagtgaggagaatgaaaccaaagacgcaatatgacctgctggaatacgagctgcttaagtagcccaggactccaactcataggcttttttagcttctgtgtataagacagttggcctgaaagtagtgtgcagtatggactgaagggttaagtttttgggagtgggaagacagttaaaagtctatgatagcaacctaagatatattacattataagagttagtaccaggactacatagaaaggtggaaaaatgcaatcactttaaacagaccaataagataattcaagataagagatgacaacacgttgagaacacagaggctctcagatctgattgtggggagaaggttcatagtctggaggattaatttggaatcaagaggaagcagagaagatttcagagtgcatttagaaatttccggagttttctcacacaaataacttactctgtctttccttactctctctttgattaccagaagctgaaagaaaggaattaacctttttctggcttgaaaacatctagagaacatactctccttcagtgtctctacacagtctcaggattcaaactacataccaccaataagagaaagattcagcatgcacactattggttgatttcccttttggtatttctgcctgtcacatagcaataaatcaagatttttctaagacctgagtacccagctgctagtcagaaaagggcccagactcaccagccatagctaacagcctctgtctctttgtacagcactggaaagtgcctcagactcagagataaaatacactaggtacttccttattgcagggagtggggacaagtgattacagattatgggaagttgcttctgggaacctatagtttcatcattgggaagtgccctgtagtaagcaaattggctttctattcttgaactctagattcttccctggggaaaaaaaatgcaaatgacaaaacattgttttgtgggttgaaacctcagcctggttttctttttccttttctctctccatagccccacatcttcttttattcatccctctcttctgatctgtcagtttttctacctctgctcgtctaaaaacacatgtcctgaatgagtaaaatctaactagtttccttgcatcttcccataagaattaaccaaatattttgtatatcttgggtttctttatttttcatttcaatttttatttgagtttcaggggtacatatgcaggtttgttacaagagtatattaggtgatgcagaggtttgtagtacaatttaacctattacctaggtagtgagaatagcacccagtacatagtttttcggctcttgccttcttccttcattcctccctctggtatttccctgtgtctgttattcccgtctttatgtccatgtgtacacaatatttagctagaacttacaagtgagattatgtgatatttggttttctgtttctgcattaatttgcttagaataatggcctccagttgcatccatgttgctgcaaagggcagggtttcatttttatggctgtgtaacattccatagtagcagtgtaccacatttttttaaatccaatccaccattgatggacacctgggttgattctattattttggctacagtgaatagtgctgcgacaaacatttgaaagcacatgtctttttgatagaacagtacattttcctttgaggattcagtcagtaatgggatgcttggacaaatgatagttctttttttagttatttggtaaatctccaaactgcttttcaaaaagatggatgcatcacattactggacttcaagctatgctagaagtctacagtaaccacaacagcaaggtattcgtacaaaaaaaacagacacaaagcccaatggaacagaatagagaaccccaaaataaagccacacacctataaccaactgatactcaacaaagtcaacaacaacagcaaaaagaaacaaggaaaggattgtttattcaataaatgtatttcttgtttaaactgtgctgaggaatcatgatggagtcttctcctccccatctccctgtcatcttacgctttgattggagacagttctgaaggaatcctcttatctacttcctggaatgctgttcttcaactgactaaaactgctttaacagttaatttttacttagggtggcaattcacttctcctttttgatattctctgagcaaagactgatcacagatgtagtctcaggttgtagtagagtatgcatgataacacagaagagatatgcccagagaaacagttaataaaaggtaaaaaaaaaaaaaaagagagagagagagagactgtaatgtgttcaactatgaaggtgtttaagaagtcagaaattaactctcatttaatctgttaaatattagaaaaaaacatatttgcaagtaaggggtagttcttcgaatcctccctaaatcttaacatccctgagtgcatgatttcaccccaaactcgttttctctgcaccatgccaggacttcactgtgcacaccatgcatcctagagtttcttcagggtgtcaggcaccatctgccaagcgcttcattttggatggctgtcttatcttttcaagaagtctgtgaactactgagggttgattcaaaacttactttgtcttaaatacttttgcaaagggtagaaacatgcaagttcatggatttgtcagtagcaaactgtgggatttgggaaaagttctttatcacactacactgtcgctgtcataactagctgtcttcccccgtctctcctgctgagctctaaattatttgaagtcagatacctgctgtaacttatatcacatccccaaagcagaaagcccagcaaacgatttttctttttttaaaaatggcacaaaataaatttttgttcaagaaagtaattaataacattgctatgtttgtaagtctgattttcttttttaaatttttatattttattttactttaagttctgggaaagaaaggtgccaatagccagtttgggtctgacagattaagtcaaacactctaaattccttagtcactctaagttccagtccctgtttcttcagtgtgggagaaaaatgaggacaagttttcatttttctaccagatttattatttcaaaaaagtttattattcagcagacataattccaaaaacctttacagaaggatctcttcacttcctatgagaaaaagaaataattaaaaaaaaaaacataggaaagaatttggttaaagacatgcaagttataaagttataccaccaatgggaacatacacaattttaaaaggaaagaccacatgctatgtttaaatataccctgctgaggtgaaggagagaaacatccaaaagtgagggtttgtagtcttacggccacttctaggccaatatcagatgaatctcaaaaggggtctaaatgaaaaactttgggagaagagcaacgtgctctgcactgaccagaagaaaggcattacttcagtattttctgtatatggcttgattatcccttatccaaaatgcatgctaccagaagtatttcaaatttcagatatttttgtatattggaattcagctgtatacttactggtttagcatccctaatccaaaaacctataatttgaaatgtttcaataaacatttcctttgaatatcatgtgggcgctcacacagtgttggattttagagcatttcaaaattcaaatttttggattaaggattctcagcctgtaaacctagagttcttgactcaaatggactttcagtaccctttcctcaaccttcccacactcccgaccatacacatgtacctgcccacagacattcatacagtttccttattttaatgtcctgggaagaggtagaaacatcttgtcaaagtcactctttcagtggtgggcatctgcgctctaccatctggctgctcaaatgaaaatcgaacctaaaagagtaaggaaagtctgtagcccttttttttgctgagttttttttttcaagaatttcttgagttatgccaaaaaactacaacaaatatagcaaaataagtgacaaaaacaaaaagtacttccatctgcaacaagtataaccatatatgtatgtaagcattgaatgaccctcctcagggcattttaaatctgctgctggatctaatagccatgagagacacaggtaaattagagtccattcatttgtctctgcagggcaggagcggggtgaaactaaatgattgttttctcaaggctgtgggtcttaatagattggattaggctcctgggtttgtccactctccaaagaactccaaaactcttttggaaagaagagcattattggaagataaacttgtctggatctgctttctatgcttccaattgcaatagccaagcattcagggaagtagagtgaaaatagcatccactagcatcttaccttgcggaaaatttcctccacatcacaggaacaggcatattcttgcatatgttcaatgagtcttccaataaaaacagagcccattgtgggatgtctccaagaaacattatctatggataaagcacatttcaaatctcaagactggctcttgcctgaagaaagagaagaaaccctagtatttatactccagctgagggatgtttgaaatcataaatttagtagcaaataaggaaaaggcggaatggggtagaggggagtgattgggatttggaaatgaaatatctaaatgtgcattcccaaagtggtattactgactgtgatttaagttaattatgcattctgatatttaatagactcagctagctatacaggggatggtaataactccatacacaagaggtatctgaggtcacgcaagtgtttgagataacccaggatatgcaatactcagtctacatggggtaattatattatcaaattctcaatttatgtacttcataaaagattaatcgaaattaaataacattgacagtaagatatttacacacaaaaagttaactataaaaatcataaaacagaacaaaagtagaaatctaggaggagtagataaggaaataagcacagtatattggaggaaaaaagttcttatgaagaagagaaatattaaagaaaaatattaatttattacatagtagacacagaagtaatgaaggcataaaattatgcaaaggaagtcataagagaaaagcagcagcaatagctctgtatgtaatgacagacacattctttaatgacacattttagccagttctaatggtcataaagtatatattgataataaaattctatttagaaacccagctatctcagctaaatgaagcctttaactgagacttgttctagtaaaaggaagtaagtgaaagatatcgtggagacagatatctttgcaaatgttttgtgaaattaaggaagtagataattatttttcttcaggagatcactatgatgtggttgggattggcacagcagaatgtggagataggtttaacatggaagttatagataactgaattggagtttctgacagtcatctagaaggtaggagtaaggaaagtgaaagaaaagaaagacacataaatcagccagattgataatgagaagccagaggcctacaaagagctacttagagagcggtgaatgtcatgtggaaggctgggatcaaaggatactaacgaacagttctgtctaatattaaactctgctatacgtactcaggctgaaaatatatggtgtttttgggtagtgtcattgtttctgatcattgggaaaaaaaaattattgagttctacatcagggcatgttcaacccaatgtagaaccaagcttcttctgaaagaagatatctcattttagaaaatattttagaaaacttaactatttgagcagagacagggcctttgggccagaggtgaccaagagaatgcaagtcctctcaggaaactgccaaaggtggtgaatgaaaggatttaaataatttttatttaaaccttgcttagaaaagtaactgaattaagttatcaaatatatacattttaaataatagcagttttttaatgtgtgctttattttgtgtcgtgcccaatatttcaaatatattaatttattaaatccttagaaaaataatatttatattcacatattagtcagcaattcaaggaaagcccgaggaggaactagtggaactgttttacaaaatactaaatgtctgggtcagtcaataatagcaagattcttactccaaagcatacgtttagaaaaattcaaatatattctgtctcacacacttcatgcttctaggtaaaacccactttaatttagggccccaaagtgtctcgcttgctgttctgcttttcagaatcttgctcttactcttctcctataaatatttgatgtctgggcaaattggactaatgaatgatctcaacatggcagaattttctatgcagagtcagattctaatgtactacagcacataccgtcttccatttaattctctgctatcgctcaaagttccaaaaatattttgaaacatagatgaattctttaattagtaatgcattgaacagatatgcaaaattgctctcttggataaagggaattctgtgtataacttggaacaaagcttgagttggtcttgagttgttaatcaccacctctagtgggttattgtcactttttctattgatagccccaacaaagatgtcctgtgtagaaacctgttacctggtgtggaagagcagaaagcgataaaatccttctctatgtgggctttcttaatagcatcatcctcaaactcttctgtagttggtaaagataggtttccagaaactcctactgaatctttaaaccacaccacaccagggctgtctggaaagacacagtttgatttgttactactaccaatggctgagaagatgttttcctcctagcctctgttcaatgatatttattaatgtgtttgctctatcattaattcacatgcaaatagacacatgcatttcagttacaatcttttcaacaatgtttatcttttctaaccatcaaacaaattgtaaaaatttccaaacatcaaaatctcaagcttaaatatggaataaatatctaccaaccagccattcaattcacagaagctgcattcttgaatactgacagtatgtgttctttgacattaaaagacaaaccaaaagaaaccaaaaattcttggatgcatacagagtaggatagtatttgattgtctggtgttctcaaaggcatcagcactcaccaccacggcaggcctggatgatgatcaccttcggtttgtccttcaaacttgggcagttcttggtattcaacatgttaaagattgcattgagttgtagtatatctgggacttgctcagagtgtttcttcccacaaatgccttcccgaataccatgagacatgaacaccaggaacgtgctgtcagaggtcttgtgctctgggcggtgtgcaaatgcctccagctctgtagtcatgtcctgaaagacaccatatcactgattttcgactatgtaattaactatcatggtaccttggaaagtcaataaataaatacttaaggagtttcttaaggaattccgtgacaaacaacagggtgccaaaaaaaaatttagtcttagtttcaagaaaggtgaaggaaagtgttataggaagtcatccagagttatcttgtagagagacagtggcattactgagtcaataaaacatttcccaattcagttataccaggcttgtgctgcatgactcttatgttacaaaggaccatgtagtatccagcactctctcatggcaagtttgtattttagattatcaagagattacatttcttggtcttacaaccaagctttctaatattattcagttatacgaagggcataaccattgtttctgttgtataatagaacttaccgaagcagtgagattttttttcacatctacgctgtaccccagattttgtagcagcattgtcatgcctgtgatgtcaacctcagctccagttcttctaggaatactgtcaaattcttcattgcagataatgagagcaagacgtgtgcggcttgacttgtccattattggataaatctgtaggaaatgcaatttgaatgaacagccttgttctttccaattaaatatttcccttcctggtttatgacagcttccccttccttagtcctatcaagataccaaaccccatgaaccatacattgaaaagggggaacagaattgaatgctgcttcaagagtatgcatggacattgcaaatgcccagatggcagctgagcttctgacttcgttgttcttgataggtaggattttgaaagatgcacaagctttgaagcaaaaatgactgaattctaaaactgattgttccaatttctgattgtttttctttgggaaaaatatttaacaatcccgtctcagcttcttgatctctaaaatgggttgtgtttaaggttaaaaattatatattatcatgtgcaaaatgcttagaacaatgcccattcttaataagcattcaatagctgtcatcactgatgttatttaccccggaagtggatccaatttggacctctttctataaacctgggattctaggatatagaaatcctttatgtaaggggagcagaagtatgattctccagaactgctcaatgaggttggctctaagaataagccactgcatttcagaactgcctgaagtgtttctttcaccccactctatccttgggttctgagcatggcacctctgccgacttttgtttccatatcctttgagcttcttctagggagcaaagcttgacattcccttctgagcctgaggatgtgggcatagctgggttgtcctgcactgcctgaggagctgcaagagacaaagaacatcatgaacagtggcatccctgtttgttccactttgtgtttgttacagcctcacctatggatgaagccacagaagaggaaatgcactctgaggaggacaatcctgatctacatcattaacacagctgagtgagtttgctcctaatggagcacatttcaagcaagagatttccaggtatgcattacaagtatcttctttcatatttcaggatcagcctttctacaagcattttagatactaacatagaaagggaaaatttaaagtctatgcctgataaaacactcagaaaacaaaaaatgtgtgagataaaatagttaagaatataaacttttttcaaaatattcaaaccctaggataaaatttaatgggatcaggtcttaatttaatctactaaaatattttttaaaatacatgtttatctttttatttatttacttaatatacatggtagtaagcactaggaatattttttaatgaatctttgtcctgtccttcaggatctcttccttctatgtatacatatgaaaggacatgaatattgaatatatgaagtagaatgaagatataatgataaatgctaaaatcaaggtacacactagatggatttatagcactaaacattcattgcacagacacttgaggaaatgttttcacagagtttatgtgagaaaatccttgagccttttatttcatcacaggttcaacacaatccaacaatgtgatgtccttgttaaagaaattaatgtaacctttgttttaaaatagaaataagttttctagatgtgtggaggatcttttagaagctattaaggcaaaaaataatatttaattttaaaaacaaatttgaaaaattgttatacaatcagttagataaacaaaggcagcatgaaatgtgctgatgtggagaagaacgaattagaatagatatattggaaaaaattatagaataatcatttgttggataaaatgttggatttcttcataaagaagtgtgaaaacaatagaaaaaaactagaagtagttaggttatttttgagctattttttcatagtagagaatacagtatttctttatatattgaatatcccatgctgtgaaacatttaagaaaatattcatgatacccaaccttaataaattcagtagagtaatatctgaacttgataaataatttgcattcctagcctctacattgctttcagatataagtttaagagtgcactatgggaataggggttctttaataaaataatagaagtagaaatagagagatggttccaaatttgagaaaagcctgcataaaacttggccatgggttgaatgttagaggtgcatgagaaggaagggtcccatatgagtttcaagttcctggtttgaacaactggtgacggtggcaccaataaccaagttacacaaaaccggaagagaagcagggtgtggaagtatagcattttcagctctgggaaagtttagaataaggtgtctctgggagatgggagtgaatatttcagtaggcttaaataatgaagtttggtacttatttgggtaatcaggatttgagacacagattcagaatttttaatataaatgtggataatgaagctgtggaaacagtttctacaaaagcagaatagattacaaaaagaaaattatatgaccaatctatgagaattctccatagcccatttacccacgtttgatcctacaaaattaatgtcaaggaagatgtgggtcaaagaatgctcttcctttaaaaacagcattacctggaaaggaagaaagtactccttgagagtcttgcatattaaggtaatttccagatgtttgatctatgaaaagataaagggtattgaagtagtcacttatcatct

SEQ ID NO: 404 - DNA, 109108 bp, Homo sapiens
atctgccttggcctcccaaagtgctgggattacaggcgtgagccactgtgcctggcccaaagatctttacagagaacaaggattatgtcgacccataaaacagaatggtctttctgctattctgacaagagcagagaaaaaataacagtcacgaacatcctcatcctgaacaggtcagccgggggggcatttggaggacttgttgtgatagagaaccagggacctaagggacacagtttgttgacggattctggcgagccttttacctcagggtttccttaaggagagctctgaccagcgggaccttggggacatcagctgcagttggaacatgcctttcccctaaattcttcacaatctcccggtacaccgtctgctgcacttctgggtgccttgccaggaggtacacagtccaagacaaggtgaaggacgtctaaggagagaaagtggcagacacaggcaggcagtgagtaacaccagggactgaaacagaggcggtggcaggtaggaagtcccctgggaatacacacagcacaaagtcaaactcatccaattccatatagcacctaatgtcttactaaaaacgaaagactgtttccttaattcatggcaaataaataaataaataaataactgaacgtatttggcaagtgacattgactctatgattcatgtgctcctgtcatgaagagccacaggaaaaatgatcctggagctttttttaatcactgaagagcaatatgtcagggatgccgtggagcctggaggatctgctgggactttgtgtgaccttctttgcagggcttgctcggtgtgtgccagaaagggcctcaggctgccccccggcatccccaggatgctgggcccggcccactctggctgccctaatctagagattggagtgcacaggagatcactagttagccatcgtgtcctgccttcatcaagtaaggtccacacagagcaagtcaataactcgtctatgcaaagcagtgtctttttttttttttttgagacggagtctcgctctgtcgcccaggctggaatgcagtgacgcgatctcggctcactgcaagctctgcctcccgggttcatgccattctcctgcctcagcctcccgagtagctgggactacaggcgctcaccaccacgcccggctaattttttgtatttttaggagagacaggatttcactgttagccaggatggtctggaactcctgaccttgtgatctgcccacctcgggtctcccaaagtgctgggattacaggcgtgagccaccacgcccggtcagccatgtcattttttatacctcttctcaaacctttctacttattgaaaataattgttttattctcgtaggtcccaagattttcgctaaaatcaatagtatcatctatgggactacatttcactctctagtaaacaaggaaatgccacagtataaaggcctttctctttcaccaaaaaaaaaaaactaatttaagcaggcaatattgatatcattttcttgtagaagatatcacgtgttttagagggcagccctcttgtatatataatataatgtgcaaggtcttataaattataaaagattacttagatgcttcctatcaagagaatagaaaatttctatttagatcacatttttatggaaaaaatgtggtatatccatacaatggaatactacttagtaataaaaaagaatcaattactgttctatgccaccacatgaatgaacctgagtcattcttctgagtgcaggaagccagatggaaaagacagcatgctatatgattccattctcatcaatgtttagaaaaatgtggcagtggtttcataaatgattccatctgtcaaaaatctgtatcgcattatgcagtttaaatggagttgactatgcataagttataccgcaataaaatcatactaatttttaaaaatcagtatgaagttgtaagaatttgttccctggcttctattgtaggatgctaaaaggaacagcttccttctgaatgccacctcattgtgatgttcttagttaccaccaggggacaggaggcacaagctcagcgacgaagccattcattgatttcttcacctttcaagtggtgtcttaatttgagcgaatccacaccatcacattcaggtagttaattagaattctcattgattgcatcatttagtttgcatttagttcatatactttttgttttattgttgcacaaaatccaaaagaataaggagtttatgctgtgtgggtttgtttttgttttgttttgttttgtttttcgcttttacatgcttaagtgatattacaataaaaataaagccttgaggcttttttgcccctttaagatgtaggtctgtgcggggcgtgccttattcaaggccgggaagcacccgtgcaaaggaaaagctttgagatgatgggcttggttgtttagtttccccacctgttaatgaagtcaatgactcctaccttagaggaagctgtgagacaggcagggtgtgcgtgcaatgctttggaaacagcgaagcgtcacgcaatcttaattctctctttccacccgaccaccagcagcaccccagcccgcagcttccccagtttccagccagaaatttcattatcttccacccactgaaagcatcagcctagctcctccctgttttgccatttccttttagcaaattttacaactgctttcacctgtacctacacggcgatcattttcacacgtatcctattaattgtatcatattacacatgtgcttttgaaaggaacttggctccttattccccccggaccatgccacccccagccagccaaaaacccatgttaactatctagtgtgttccctccacgcgctgctctgtgttcgcacagtcacggacagatgtgcagatgcacacagccgggagggggcggtgccgctgcatcttactcacaggacacagtatacatgctggtctgcctcttcctttcccatcggatagcctgtgggttccccccaggttaatgggcagtgctctgtctcattctgatatgaaccctccctggtcccagtgtatcattgatctgccatgctactgggctccattcacagggaatttgttgatacacacacacacacacacacacacacacgcactcatcaaccaaactgctttagtttactttctttacactctctttagcaggttttggttttgaagttatgttggctttatagaacaaattggggagtgaatgaaatgaattcttggctttataaataaattccatggcctggaatattttaaatgataactaataaggtttttaatgtctgtaccctcttcatgtatgaaattatgaaacaatgacaaaatgtttacaaatcaggaatgatttgtaaactttaaacatttattatcattttgtgtgtgtgctaatggaattttggttatgcttttcacagaaatcattatgcaccttacatttaatatacaatcatgcatcgtatagtgatgttttggtcaatgatggacccaatatacaatggtgatcccataagattataaagccacatttgtactgtagcttgccaatgtttaagtatgttagatacacacatacttaccactgtgttccagctgcccacagtattcagtacagtaacattccgtacagttgtgtagcctaggagtaataggctctaccgtgcagcctaggtatgtggtaggctaccatctaggtttgtgtaaatacactctaagatgttcacgcaatgacaggaccacccaacaacgcatttctcagaacaaatctgcatcattaagtgaggcgtgactgcatacacagagttttctcctcctggagccccccagcagtgcagcaggcctagtacaaacatgaacagtgtgctaaacaaatctgccttaaaagtagacaacggccagtcgcagtggctcatgcctgtaatcccagcactttgggaggccaaggcgggtggatcacctgaggccgggagttcgagaccagcctggccaacatggtgaaacccccgttgctactaaaagtacaaaacattagctggaagtggtggcgggcgcctgtaatcccagctactctggaggctgaggcaagagaatcacttgaacctgagaggcagaggttgcagtgagccgagaccatgccattgcactccagcctgggcaatagagtaaaactccatcctcccgctccaaaaaagtagacaacgtccatgaggtgatgaggaaggggttatcgtgtgttgcttgctgagaacaggacccccagactcaccgtgtcgacgccggccagcagcatctcagtcacgttggcgtagatctcctgcagcgtcagagcctggctaaggaagaggtatgtgagaagtcccccgctcaccctccggcctcggtccatttggtactgtatgtccctcaacttgttgtcaacatgaatttggcctgtttgaaaacagtatttcttttgaaaggagtttgggttgagaatcatcttttcagtctcaaagccctctgtcctcccagtagcttaactaaaccagtggcaggtgacagagggtaaggaaacccaatttatctaacgtcaacctgggagtttcactcatacacttgcttatgtaaatgaatgaaaagttaaaagacaagctaaacgtatcttcctttttaaaaataagctgtaggatatttgcagatgtttgctttactaatccaatagccaaataaattatttatataatatgagtaacaaaatgcaaactcttttatttttttctaccacactttcagaagagaaaatgagtggaggggaaaaggccacacattattatctgggatgttaccatacagcacagacttcaggacttctatattcaaataaatgttgtggttgttgttgtttccttaagacagaggctcgctctgtggcccaggctggagtgcagtggcaggatctcggctcactgcaacctccgcctcccgggttcaagccattctcctgcctcagcctcccaagtagctggaattacaggcacgcgccaccacgcccagctaatttttgtatttttagtagagacgcagtttcgccatgttggccaggctggtctttaactactgacctcaggtgatcctcccacctcggcctcccaaagtgctgggattacaggcgtgagccactgcacccagcctaaatattgatcttgaaaagacaccatgaaacactttattcagtgttagcattgctctagaacattgttctaagcattttgaaaataatttctttatttttggcaatgcttttatagtaaaaattttagtcacataagaaaacaaatctctttgtaatctcaccttggatttgaacaaaaattgtcacattcaaatgaatgtgcgtggacctgaaactctacattttaagcactgaccaatttatttggagtaaagacatcatcttgcatggacatttacttgtacctgtccctgctagcatgctagtgaaaataaaaattattttaaaatgaaaaaactgatcatgttacctgtagtcacaacccacatgctttttgcttctttgaaaaacaaatccatggccaggcgtggtggctcacacttgtaatcccagcactttaggaggtcaaggtgggtgatcacctgaggtcaggaattcaagaccagcctggccaacatggtgaaaccccatctctactaaaaatacaaaataattagccaggcatggtggcaggtgcctgtaatcgcagctactcaggaggctgaggcatgataatcacttgaacctaggaggcagaggttgcagtgagctgagatcacaccactgcactccagcatgggcgacagagccagactccgtctcaaaaaaaaaaaaaatccaaaagttatgggtccaaaaactaacacgtgactacatctaggcatcctctgctatggtcacccattgtctggatgagagttagacacacaacacggcaggtcaacctgcttctgcaaaaggtgctctcaattcttctcttactgaatttgaagagtccatcccaggacctgcagaattcccgccagggctttgggatgaaggggcgaagccatctggggatggcgcctgcatacatggaggtcttgaacatgctaaacatgagctccagggcctcgatgtattccacagtcagctgtgggatgctgttttccaggcagcccaaacgactctcataaaggatggtggccactcctagacaggaaagagaatttgaaaaccctcttctagattatttaccataccaacaggcaatgttgggccataaatgcaactttcaaacgtggtccaggtgcctttcatgaatgaggcatcgtccctctgaggatttctctgcatcctgaactgcagggtgctggcatttagggctgacaggtggtgctgttgctgcttcacctaaggagccccacagccctgggaggcacagatgaagaagcccactctctggaggaaattcgaagactctgagagtttaagtagcttggctaaggctgcagaggaggaccctgggacagatctggagcacaggtctgaaatgatgagccctggggaggggacaatcaccgagcgtgtcactgctctcccccaacaccctcctctcaggaaggagtcggcaaacctcacatggcctctccctgccccacctggccactggggatcgccttccagccacttgcccaacttgaggaattgaaaagtgactcctcctggccaaaacgcagagcccaggcctggagagctaaaggcgcagcagaagtggcctggatgaatccgtgtcgggcagagctgtgaactgtatttaccaatcacttctgggatgattttgttactaattttagagaaaattaacatcagaactctgcaaagctaacttgagtgaaagttgaaggtaagctttttttaaaaaagatgagaaagctgatagaaagtcctccaagatgcattctatttttttttttttacacaaacatcaccatgttagaccaacatgctttttttttttttgagatggagtttcactcttgtcacccatgctggagtacaattgtgtggtcttggctcactgcaacctccgcctctctagttcaagcgattctcctgcctcagcctcccaagtctctgggattacaggtgcccgccaccatggcccagttaattgttgtatttttagtagagacagggtttcaccatgttggccagactggtctcaaactcctgacctcaggtgatccacccgcctcggcctcccaaagtgctgggattacaggcgtgagccaccgcacccagccccaagatgcattcttaagtaaagagaaagcacggtgcagaacagtatgtttggtgtactaccctttattgtttaaaaataaaaagaatattcacatgcgtttttctgtatgtgcataaaacatctcttgacatatacatgagagactagtgacctttgctgcattcaggaaagagggagaccttcactgaagcctttttggtattgctatttgaacaggaatgtaccactcattcaatatgactaaaagctagaatgagtttgaagtagatgccctctcaacttcactcctttttaaaaattatgctcaaacaaaatgttttttttttttgaacatgtaaattagtaattaggaacatggcttcttgagtttaaaagacctgaatttgaaactaactttctgcctctaaaaagagggatgggggtgtggcattgggcaagttcttttttaagtccagtttcagccaggtgcagtggctcatgcctgtaatcccagcactttgggaggccaaggcgggcgaatcacgaggtcaggagttcgagaccagccttgccaacatggtgaaacactgtctctactaaaaatacaaaaaattagccgggagtggtggcaggtgcctgtaatcccagctactcgggaggctgaggcaggagaatcgcttgaacctgggaggcagaggttgcagcgagccaagaccacatcatagcactccagcctgggtgacagagcaagacttcatctcagaaaaaaaaaaaaaaagtctcagtttcctcattggtcaacggtggttcacaccaggttcacgttagcaccgtggaggtgacatgcatgtatgtcccagacttagcacactgcctgggacccagggaatgatccaagatgacatctgcaggtttggggcaagtatccattcttccctccttcccacctgctgattccacctcaccttccattgaatatttgaagaaaagatcattgacattggtcacggtttctccatcttctgcctggctcctgaggaggtagattcttttaattaagtcagcaataacttggttgacttctccagaataaatggccacatctttcggtttcagaattctttgtctcaatacgcttctcatcttgagccactgttcaccctccctagaagaatcaagtgagtttcaaatcatcttacttacactgacattctgggaaagaattcaaggaacctctagaaaaaatttcagccataaagaatcaacaagagctgcccaacaaagtagaattaagacaggaaagactttttgctggggagagagaagttaataactgcagccctggagcctgttagagcttcttacactcttgcctttgaagcaaactttaaggaaaaaactaccagtggtaagtaataatctttagtaaaagtaatacgacttcctttaaaaaatcttgaaataatattgtaataaagaaatgagattgctaattagcaaaagaaaaatatatatatatatgcatacatatgtatatataaatgaagtaagtactgatattaaaaaagaaaaagagggccaggcatggtggctcatgcctgtaatcccagcactttaggaggccaagatgggtggatcacctgaagtcaggaattcaagaccagcctggccaacatggtgaaaccccatctctaccaaaaatagaaaaatttagccgggtgtggtggtgggcacctgtaattccagctactcgggaggctgaggcaggagaatcacttgaacccgggaggcagaggtcatggtgagccaagatcacgccattgcactccagcctaggcgacagagcgaaactccatctcaaaaaaaaaagaaagaaagagagagagagagagagaaaaggaaggaaggaaggaaggagggagggagggagggagggaggagggaggggggagggaggaaggaaagagagagagaaagaaagaaaagaaagagagagagaaagaaagaaaagaaagagagaaaggaaagaaagaaaaagaaagaaagaaagaaagaaagaaagaaagaaagaaagaaagaaaggaaggaaggaaggaaggaaagaaagaaggaaagaaagaaagaaagaaagagagagagagagagagagagaaagaaagaaagaaagaaagaaagaaagaaagaaagaaagaaagaaagaaagaaagaaagaaagaaagaagactgcagcttgttaccagggtgtgggaaagaaagagggactgcagcttgttaccagggtgtggggccttggggctcctggctgcactcggagagcacccaggtagcaggcccagcacaccgctcccagtgaaggcaggacgctgagggaaccccttggaggtctgaggagtgttctgcagtttctcagagggtcgtggcaggactgagcctcaagtgcccacgagcgtcacccacacctccacacctccgcatggcttgcctcccaaccctgctccactttcgcgttctcaaggagaccacctgcactcaaagccttgcctccagatggactttggaggacccaagctaagccagcccggcgcctgggcctaggcactgcccttccctttgctgtccactgtgctgaagtcaccagcaccgcctctctccatctcagccgaagaggggtccaggcacccacacaggctcctgagcctgcagctaacggggcagacagcagagagattctgcctcagcattcgggcccctctaggcctgaacatccaggaggagctgtttaattatttcccccaggacggaaattgagggaccctggtgacatctggtcacgattcttatttatcttacttgagaaattggtggctgtatttctccccaatttatgtataaggacatagatatcaaaagagctgcaaacagaagtcccaccccatggggatttggaccggggcatctgcaggcgccctgggcctccctgcctggccgcgggccacgatctcttggaaggcacagaggtgttggtgacgctggttcaaaatgaataatcacagtctgctatgagacaggaaaatcaccacgtggcgaccaaggctggaggttcttagcccctcgtcaaagggattttcctgaaatagtgaccacctcctttccctgtgcacagacaagggcgctgtgagttttgtctgcctcggttatcactgaatggactcccaaagccacaaagccctgcttccgaagcgctctgcccaccacggagccagcgtcgcccctcctggctcctgacgggacaactctgcacggaggaggagccagaaagcccagcagggctctcatgtctgggagatcgcacaaggagactgtctgatatcattccatgggggggttctgtgcttttttaagagctggcttttaggaactcagctttggaggagggggcctccccctgagctccccctccagcccgtggctcagcccgggcccacatactcacgccgagatgagcccggtggctctcccccgcaagtctcggtactcccgccaggactccatgttggctctctggggcgcagcgccctccgcccggagcacctgagccaccatatcgcggtctgcaatagatactacaaactgaggaccaaagtgagacttgaagatttttccatattcccgtgtgtgcttctgctgcaataccatggagaaatcaaaaaaggaaaaaatacatagatatgatatacctttaacataaacatcctgtgtgctagaggagcagaaaattggggcagagggaagtgctatctaacacagcactgaatcagagcagtaatttacatattgctgagataaacatgttttcacataaccatctcttttttgttgtttccgtttgtttgtttgtttgtttgtttgtttgttttttagagacagggtcttgctctgttgcccaggctggagtgcagtggcataaacatagctcaccgcagcctccaactcctgggcccaggcaatcctcccacctcagcctcccaagtagctaggactgcaggtgcacacctccactcccagctaattttttattttttgtagaaacaggggtctctcaatgttgccaggctggtctcgaactcttggcctcaagtgatcctcctgcctcagcctcccaaagtgctgggattacaggcatgatcatggaagttttcttattctttagggatatgtttttaaaactaccttagctgtgtgaagcaacaagagagaaatgtcattataagagacaaatgtccagagcaaacagagccctgtctgccagcccctttccatgggcccaacagctctacccaagcagtaccaagccaactctgcagagcaagccctctgtggacagtctgtaacgagcctctaaaactgactcccagcaagaaaatgaaggaaaagacatctggattggaaatgaagaagtcaggctatctctattggcagatgacgtgatctcacatacagaaaatcctacggaacctactaaaaaactattagaactaataaacaagttcaataggacacaaaatcagtatacaaaaatcaattgtatttctatacactagcagtgaacaatccaaaatgaaatttaaaaaacaattcaatttacaatacatcaaaaagaatacaatacttgaccagctgcagtggctcatgcctgtctgtaatcccagcacttttgggaggcttaggtgggtggatcgctagagcacaggagttcaagataaggttgggcaacatggcaaaattctgtctctaaaaaaaatacatggctgggtgcaaaggctcatgcctgtactctctgcactttgggaggccaaggcgaggggatcacctgggttcaagagtttgagaccagcctagccaacatggtgaaaccccatttctactaaaaacacaaaaattatccaggcatggtggtgtgcacctgtaatcccagctactcggaggctgaggcagtagaatcgcttgaacccaggaggcagaggttgcagtgagccgcaagactgcgccattgcactccaccctgggcaacaagagtgaaattctatctcaaaaaatacatatatatacaaaaattagcgaggcatggcagtgtgagcctgtagtcccagctactcaggaggctgaggtgggaggatcacgtgagctcaggaggtggaggttgcagtgagtgaagattgtaccaccacactcaggcctgggtgacagagcaagactctgtcacaaaaaaaaaaataataatattcttagaaataaatttaacaggagaagtgtaaaacctatactctgaaaactataaaacattgtctaaagaaatctacaaaacattgtttaaagaaatctacaaaacattgtttaaagaagcctgaaataaatggcaagacatgaaataaatggcaagatatcccatgttcatggactggaagacttaatattgttgagaaagaaatacacctcaaagtgtataaatagattcagcacaatccctatcataattccagtgggcttctttgtagaaactgataagctgatcctaaaattcatatgaaaatgcaagagacccagaatagcctaaacaatctcgaaaaaagaacaaagctggtggacccccattttcctgtttcaagacttagtatgggagaggggccaagatggccaactagaagcagtggtgctcagaggctcccatcaaaaaaaacataataagcatgtgaaaccttccctggcagccagggtatccaggttctctcatcaaaattgactagaaggctggcataacccacggagagaaggaagaacagtgtagtgcagtggcccacctggaagccacacggggaagggaacccactccccccagccaagggaggtggtgagtgagcgggctacccagctggggaaactgtgctttttccacagaactgtgcaacctacaggtcagaagatcccactctcgaacccatgccaccagagccaagcatcccaaccctggtatgcacagattcctacagcctctcagctggaatctgtttaagcctactgaactcctgaggggatgggcgaccagcaccagctgcggctgcctgctgtctaagtaatttgagctccttgggggaggggcagcagccagcactgggactcacaactgccaacaggctaagctccctgggttggggaagggtggcacccatttctatagctccaggctgcacttttcccctgctggagccagggaggctggatggcttggtcccaagagttatccccacagctcaacacaccagctgtggcagttggcagccagagtgcctcttcaggtctaaccctgatccatccttcctcagtggctggggattcccagcaggatctccaacaattccagtcagaggctcggggacagaactctgatctccctgggcctgagcccttggggaaggggtggccacagtctctgcggaccagcagatttagcctcttctcctggtagttctgaggaatccaggcaatccagactagtgggtttcccccaagcaaaacacaccctccccaccaagggacaaagtgctttattaaaaggttcttgctccccatgccacccaactgggtgagaccctccaataggggttgtcagataccctatacagaagcaatcctactggcatcaggttgatgccccttgaggtcagaggtcccagaagaaggagcaggcacccatcattgctgcacttcagcctccttgagtgacatctccaggcacaggagcaaatcagaagaatagggcctgaagtgaacccccagcaaactgcagcagccctacagaagagggattgactattgaaagaaaaacaaacagaaagcgacaacaacagcattgataacaacaacaaaaaaaggcccccacaaaaaccccatccaagggtcagcagcctcaagactgaaactagacaaactcacagagatgagaaataatcaacaaaaaaatgctgaaaaccaaaaggcctgagtgcctcttctcctccaaataatcacaatgtctctccatcaagagcacagaactggatggaggatcagatggacgaattgacagaagtacacttcagaagatgggtaataaaaaactgcgatgacctaaaggagcatgttctaacacaatgcaaagaagctaagaaccttgataaaaggttagaggaactgctaactagaataaccagtttagagaggaacataaatgaccagatggagctgaaaaacacagtgtgagaacttcgtgaagcatacacaggtatcaacagccaaatcgaccaagtggaagaaaggatatcagaatttgaagaccaccttactgaaataagacatgcagacaagaatagagaaaaaagaatgaaaaggaataaacaaagcctcaaagaaatatgggacttcataaaaacagcaaacctacaatcgactggagcaccagaaggagacggggagaatggaaacaagctggaaaacacacttcatgatattatcaaggagaacttcctcaacctagcaagacaggccaacatgcaaattcagaaaatacagagaacaccattaaaatactccacattaagatcaaccccaagacacatagtcatcagattcttcaaggttgaaatgaaggaaaaactgttaagagcagccacagaggaaggccaggtcacctacaaagggaagcccatcagactaacagtggatctctcagcagaaactctatacgccagaagagattgggggccaatattcaacatagttaaagaattttcaacccagactttcatatccagccaaactaagcttcataagcaaaggagaaataaaatcctttccagaaaagcaaatgctgagggattttgttaccactgggtctgccatgcaagagctcctaaaagaagcaccaaataagtaaaggaaaaaccagtaccagccactgcaaaaacacaccaaaatataaagaccaatgacactacgaagaaactgcatcaactagtgtgcaaaataagcaaatagcatcatgatgacaggatcaaattcgcacataacaatactaaccctaaatgtaaatgggcaaatcccccagttaaaagacacagactggcaaattggataaggagtcaagacccatcagcgtgctgtattcaggaggcctatcttaaaggcaaagacacacagaggctcaaaataaagggatggaggaaaatttacaaagcaagtgaaaagtgaaaaaaaaaaaagcaggggttgcaatcctagtctcagacaaaacagactttaaaccaacaaagatcaaaaaagacaaagaagggcattacataatagtaaaaggaacaattcaacaagaagagctaactattctgaatatatatgcacccaatacagaagcacccagattcataaaacaagttcttagagacctacaaagagacttagactcccacacaataataatgggagactttaacaccccactgtcaatattagacagatcagcgagacagaaaattaacaaggatactcagtacttgaactcagctctggatcaagtggacctagtagatgtctacagaactctctaccccaaatcaacagaatatacattcttctcagtgtacatggcacttatttgtcaattaaaattgaccacatatactcctcagcaagtgcaaaagaactgaaatcataacaaacagtctctctgaccacagtgcaatgaaattagatcttaggattaagaaactcactcaaaagcacacaatatcatggaaattgaacaacctgctcctgaacgactcctgggtaaataatgaaattaaagcagaaatcaagaagttctttgaaaccaatgagaacaaagagacaacgtaccagaatctctgggatacagctaaagcagtgtttttttgtttttttttttttttttttttttttttttttgagatggagtctcgctctttcacccaggctggactgcagtggcgctatcttggctcactgcaagctccgcctcccgggttcatgccattctcctgcctcaacctcccgagtagctgggactacaggcgcccgctaccacgcccagctaatttttttttgtatttttagtagagacggggtttcaccgtattagccaggatggtctcgacctcctgacctcgtgatccacccacctcggcctcccaaagtgctgggattacaggcgtgagccactgcgcccggcctaaagcagtgttaagagggaaatttatagcactaaatgcccaaatcaaaaagctagaaagacctcaaattgacagcctaacatcacaattaaaagagctaaagaggcgagagcaaactaatccaaaagctagcagaagacaagaaataactaagatcagagaaaaattgaaggagatagagacatgaaaaaccctccaaaaaaatcaatgaatccaggaactggtttttggaaaaaattaactaataaagaaggagagagagaagaatcaaatagacacaataaaaaatgataaaggggatatcaccactgaccccacagaaacacaaactaccatcagagaatactataaacacctctatgcaaataaactagaaaatctagaagaaatggataaattcctggacgcatacaccctaccaagactaaaccaggaagaaatttaacccctgaatagaccaataacaagctctgaaattgaggcagtaattaatagtctaccaaccaaaaaaagcccaggactagatggattcacagctgaattctaccagaaatacaaagaggagctggtaccattccttctgaaactattccaaacaattgagaagaagggactcccccctaactcattttatgaagccagaatcatcctgataccaaaaccaggaagagacagaataaaaaagaaaacttcaggccaatatccctgatgaacattgatgcaaaagtccttaataaaatactggcaaaccgaatccagcaacccatcaaaaaacttatccaccacgatcaatcagcttcatccctgggatgcaaggctgttttaacatacacaaatcaataaacgtaatccatcacataaacagaaccaaggacaaaaactacataattatctcaatagatgcagaaaacgcctttgataaaattcaacatcccttcacattaaaaactctcaataaactaggtactgatggaacatatctcaaaataataagagctatttatgataaacccacagccaatatcatattgaatggacaaaaactggaagcattccctttgaaaactggtacaagacaaggatgtcctttcttaccactcctattcaacatagtattggaagttttggccagggcaatcaaacaagagaaagaaataaagcatattcaaataggaagagaggaagtcaagttatctctgtttgcagttgagatgattttatatttagaaaaccccatcatctcagcccaaaaacttcttgaactgataagcaacttcagcaaagtctcaggatataaaatcaatgtgcaaaaatcgcaagcattcctttacaccaacaataggcaagcagagagccaaatcatgaatgaactcccattcataatcactacaaagagaataaaatatctaggaatacagctaccaaggaatgtgaaggacctcttcagggagaactacaaaccactgctcaagaaaataagagaggacacaaacaaatggaaaaacattccatccttatggataggaagaatcaatatcgtgaaaatggccatactgcccaaagtaatttatagattcaatgctattcccatcaaaccaccattgacattcttcacagaattagaaaaaaaaaaacttaaatttcatatggaattgaagaccccatatagccaaaacaatcctaagcaaaaagaacaaagctggaagcatcacgatacctgacttcaaactatactacaaggctacggtaaccaaaacagcatggtactggtaccaaaacagacatatagaccaatggagcaaaacaaagacctcagaaatagcaccacacatctacaaccatctgctctttgacaaacctgacaaaaacaagcaatggggaaaggaactcctattcagtatatggtgctgggaaaactggctagccatatgcataaaactgaaactggaccccttccttacaccttatacaaaaattaacgcaagatgaattaaagacttaaatgtaaaacccagagccataaaaaccctagaagaaaacctaggcaataccattcagaacacaggcatctgcaaagatttcctgatgaagacaccaaaagcaattgcaacaaaagccaaaattgacaactagaatcaaattaaagagttcctgcacagcaaaagaaactatcattggagtgaacaggcaacctacagaatgggagaaagtttttgcaatctacccatctgacaaaggtctaatagctggaatttacaaggaaattgaacaaatttacaagaaaaaaacaaatggccccatcaaaaattgggcaaagaatataaacagacacctctcaaaagaagacatttatgtagacaacaaacatgaaaaaaagctcaatgtataatgtatacatcactgatcatcagagaaatgcaaatcaaaaccacaatgagataccatctcacaccagtcagaatggtgattactaaaaagtcaggaatagatgctggcaaggctgtggagaaactgaaacacttttacactgttggtgggaatgtaaattagttaaaccattgtggaagacagtatggtgattcctcaaggatctagaaccagaaataccatttgacccagcaatcccattcctgggtatatacccaaaggaatataagtcattctactataaaaacacatgcacacatatttttacagcagcgctatttacagtagcaaggacatggaaccaacccaaatgcccattaacgatagactggttaaagaaaatgtggcacatatacaccatggaatgctatgcagtcataaaaaggaatgagatcatgtcctttgcagggacatggatgaagctggaagcaatcatcctcagcaaactaacacaggaacagaaaaccaaatactgcatgttcttattcataagtgggagttgaatattgagaacacatgaacacagataggggaataacatacaccagggcctgctggggtgggggttgaggggaggaaacttagatgggtcaataggtgcagcaaaccaccatggtgcacgtacacctatgtaacaaacctgcatgttctgcacatgtatccgttttttgtttttttttttttttttggtttttttttttttagaggaaattaaaaaaaaaaagacttagtacaggccgggcgcagtggctcacgcctgtaatcccagcactctgggaggccgaggtgggcagatcacgaggtcaggagatctagaccatcctggctaacacgaggaaaccccgtctctactaaaaatacaaaaaaattagccaggcatggtggcgggcgcctgtagtcccagctactcgggaggctgaggcaggagaacggcgtgaacccgggaggcggagcttgcagtgagctgagatcgcaccaccgcactcatgcctgggcgacagagtgagactccatctcaaaaaaaaaaaaaaaaagacttagtacaaagctacagtaaccaagacagtgcagtaatggcataatcattggcttagatttaagactcaaacatctatggtcaactgattttcatcaagagttccaagatctttcaataggaaaaggatttaatagtctcttaaacaaatggcacagggacaactggatagccacaagcaaagaatcaatttttacctttttctcacactatataaaaaaattatctcaaaatggatcaaagctctaaatgtaaatgctaaaactataaactcttagaagaaaacataagggtaaatcttcatgaccctgggtttggcataatgtcttaagatatgatccctaaagtgcaagtaacaaaagaaaaaaatcgataataggacttcatcaaaatttaaaacttttatgctttaaagaacactattaagaaagtgaaaacaaggccggccataatggctcaggcatgtaatcctagcactctgggaggccaaggcaggtggattgcttgagcccagcctaggcaacatagcaagaccctgtctcattaaaaaataaaaataaaatgtaaaaataaaaagcaaaaacaaccttcggatggagaaaatatttgcaaagcacatatctgataagggacttgtacccagaatatatagaaacttacaaatcagtagaggaagggagggagggagagagagagggagggagggaggaaggaagaagagagaaaagaacccaattaaaaactggacaaaggatttcaatggatatttctccaaagaagatatacaaatggtaaataagcacatgaaaatatgctcaacatcatcagtcatcagggagagatagcacttcgcacccactagaatggccataatcaaaaggacaagtaataacaaatgttgacagggatgtagaaaaatcagaaccctcttatgataatggtggggatgtaaaatggtgcagatactctggaaaacagtctggcagttcttcaaaaggttaaatatagaattactatttgacccaacagttccactcctagatacatatccaagagaaatgaaaacacatgtctacacaaaaccttacacacaaaaattcacagcagcattattcattacggctaaaaggtggaaacaatccaaatgtctatgaactgatgaatggataagcaaaatgtggtatagtcatacgctgcaatattatttgtccataaaaagaatgaggtactgatacatgctacaacatgagtgaaccttaaaaacattatactgaaatgtttaaagtgaaagaaaccacccataaaagaccacatattacatgattccacttatgacatgtccagaataggccaatctatagatacagaaagtagcttggtggttgcttaaagcagggggaataggagagttgggggtgatagctgatggatatgggatttctttttgaggtcatgaaaatgttctacaagttgactgcggtgatggttgtatacttcaaatggatgaattatatgatatgttaattatatcttaagaaagctgttactccctgcataaaaagaaatcacaataaatgtaaatagactaaattattcagttaaaacacaaaagtgatgagcctctaacatggctcagcatgacacagacagggctgggctggggaaagttactaagactctctttggtatctgcccagctttctcaccactccagctctcaatctcagaaacagtgggccaggagcactgtcatttctctactcttatactcactccttctggagacctgaaaatgaagacattcagactaaactggaatgagtccatctccaaggggtcacttctgcctaacaaataagtggcccccaaagagttcaggtctctaaaggggcccactgaaggaatgactggtaacaagaactactgggaaatgggccactcctcaagcaaatccagctactgaattgggtacaatcagcacaagggaactggaggtagaaatgatacagatagttttcatcactttctggtggtgggccatggaactatacagtcaggcacagtacttagagtttgcttggatgttaagagcacagactctggagtttgaatctgggctcacagtttactagctgaataacctttggaagttaggtcccactatgcctcagtttcctcacccaaaaaatggagaaataagtttcacgtaagacttgaaactgtgcctggcacatgaaaagagttctagaaatactgatcgttattatttgttattattacagtttcataacactaagctcatttgaccttatcataacccatgagaggaatggcgattgctaatctcctttacggatgagaaaactgaggtgcagagagaatgagtgactagcccaaggctccacaggtggctgcagagggccagcattggaggacatgactcctgtttcggccatcctgctgctctaccacaccctaaatagcatctagtgacccaaattatgatttctactctgccaatcaccagctgcctgaccttaggcaagtcgcttaggtaaccacccaactctttccatctgtaaaatgagaggtgagctatgtaggtgaacactaagagcccttgtttagctaacattctgtgattgcaaggggagcgcaagtgaactggatgtgatgggccacagaacaatgagcaacctggagagcgggaagagagggtttttctagaaccatgtgttcgaaattgggagtcctcagaggggctgcaggaaggtgagagtccccacaagtaccatatttgagggttggggtagtgccacctggagagtaaagggaaagaactttttcctttatttcttttactctccaggtcctgtgtgcgcttggtgagaaggcagcaagtgagtcagttgtgactctctgctccgtgccccagggccctgggtgtggtgaaggaagctgtctgagcagtgggcaggaggggctgagctcagggtgagggctggcggcaggggcgggtgaatggaaaatacccatctgaactgccacacatcctgactggatacaggctttaacacggtccgtctcaaagaaacctgtgcccatggaacaaactctgggtgaggtatgaggataaaagcagatggcagtaggggcggataaaagaaaaattaaattacacttcagaaagcaggctgtattgaacccatcaacagcaaataacaaaacactttttactgtatttgaaagttgccatcctgatatcttatcagatcctacaaagaaaatcatttttgagccctctaagcattggggtgggggtggcggtttggaactgtatagggttggcgtggcggacttgaggagggacggttgggacttcctggcattaaaattaaattaaattttaattcccggccgaattaaaattgctcctcgcacgcccgtttttccattaatgagggttggggcttctccctcacgttcattgactgaatggctgatggaacgaatgaatgactgaagcccaggtgggtagttagaagaggcttcgatggagaagggtctcgaaagaccggaactctgggcagaaggacaggcctgggtgggaggagaagggggcgttctcggaagacaccaaaagcccccataccagaaataacagtgcgtgctgggccgggcacccggggaggcggacgatgggcgaaggcatcggagggcgccgccgcggctcgggtgcagtgcccctgccacgaagggcgcaacggaggtgggcgtgggaaggacagcactcaggctccaagtgggaagcgtgcggaattcgccggccccaacgccctagcgggtggctgggacccctgggttcctcccacgtccctgcctccagtcccggcgcgaactccaggtgtcgcccccaactccggcttagagcctacggcaccccgagcctccgagcctccgtcccctcttcccccgccattacaaaatacaaaaaggactagaaatgaatacacacggtctcggccacctaaggacaccgagctccgcagagcctagaggagctagggaacctagcgctcccctcgggccggccccaggcagcagcccccctcagccccaactccgcgggtcccgccagctctccactcccaggccccggcggcgtccaccaggcgcccgctgcccctccccaagtctcctcctccgggacctcagccctggtgccctccccgcagtcccattcctggtttcccttcgcggcgccccctccccaggttccccaaccaggcaatccctgcctgggtccctccccgggaccagtccctggagaccctgcccgccgcctctctcgggctaccactctccgaaactccatccctgactcccctccccgctacctcctccccaggggtcccggctggggcccctccaggggacccctccctgccgccacctcccgagacacccatttcccccgcctcttcccagccgttcctttctggccccgttcctcagctccctctgcctgctgcccctctccggggtccgcttcccgaagacccctccccaacgcccccgccccgctcccggttcctgcctcctccaccccggatcgcctttccggcgtcctctccccagcgccccttcctgcgaaccttaaccggacaaccccagtccagctcccccaacccaccgcggcgcccagtgcccggggatccctgcccgccgcccctccctgggactccccaaccccgcgcccctccctggcgccctcccgcccgcgccgtcagccttctgggcagcagcccgggctggctccctcccggggcggcgcgcgctacctggatctcgtggatgcggctgaagccgtccctgcagaagaactccgccaggttggcgagggtcctcggccccggcatggcggcgaggctccggggaccctcggctcggccccctcccggcggcgaccccggccgcccggcgcctttgtcctcggcccgcgcccccgccgggagccgtgcgcccgcgggttgaggccgccgcggggccccgccgcccaggagcccaccccgctcgggcgccggccgcagcccggctctcaggatccgcgccagcagggccatggcgctcgtctgcatcggcttgtttgtctgagcaactttgtttcgggggctgctctttgggttgctgtttcctgcgtcttaacttgtcagagcagtgcttctccgtactcctgccgccggggcgtcagtttacacagacccttattaaaggctccctcccctggggctggggaaaaggctgtgattagactgcaagagaatgaggctattattatttcttcacatcatattaattcacacttaagcgttccttgaaaccaccaagttttaaggtcaaccccacttccaaccatggccaaaaaaagaaaagtctacggggatcttgtaaattattaccgtccttcgaaatgactactgaaggtatactgaagaaatctttggtcttttttgcattttagaagcagttctttatggtttcaacttaaattattgtaactcaactttcaaagggggggaaaaaagtgagacgattttgcatgtagttcctactgttgtaaaatgaccacattattatcttgccacaagctttcttaaagacaatcacagtcgtttacgatggctttcctcgggctcatcgcttttattccgcacaccattggaagcagtgaggactaggtgagggtgagcgactttgagcatggggcgtttatctggtccctcacaaggacgggtcctgttgcacaaggcttggggaagagaagccacctccatgccgaggcgaggagaggagtccgccaacctagactcagagcccagtgcctggctgcacaaagaagtggccgcacagggagggatggagcacgggaaaggccagaggtgtgccatgtggtttcaaggaagggaactttttcctagtcagtagttaaactgctcgctgagttacattatttgaagatttcataccgttggtactcatgcatctaaacgtaaaaaataagatttttttccgtttacaacgtattgttactaagcattttttttttttttttttttttttttgagacagtctcgctctgtcaccaaagctggagtgtaatggcgcgatttcggctcagcaacctccgcccccagggtcctagcgatcctcttacctcagcctcccgagtagctgggattactgacgctgtaatcttgaaaaaaaaaaaatgctgccgcgcccggccaacatttattttttaagagcagagagggaggttcaggcctgtagtcccagaactttgagaggccgaggtggacggattacttgagttcaggagttcgagaccagcctggccaacatggtgaaaccccatctctactaaaaatataaaaaattagccaggcgtggtggcacgcgcctgtaatcccagctactcgggaggctaaggcaggagaatcgtttgaacccaggaagtggaggttgcagtgagctgatctcgccattgcactccagcctgggtgacagcaagactccatctcaacaacaacaacaaaaaagagcaggccgggcgcggtggctcacgcctgtaatcccagcactttgggaggccgaggcaggcggatcacgaggtcaggagatcgagaccatcctggctaacacggtgaaaccccgtctctactaaaagtacaaaaaaattagcctggcgtggtggtgggcgcctgtagtcccagctactcgggaggctgaggcaggagaatggcgtgaacccgggaggtggagcttgcagtgagccgagatcttgccactgcactgcagcctgggcgacagagcgagactccgtcaaaaaaaaaaaaaaaaagagcagagaggggtctggcagtgttgcccaggctggagtgcagtggctatacacaggcactatcactgggcactacaccttccaacttctgggcactacaccttccaacttctgggctcaagccatctccaacctcagcctcccaaggagctgggagtacgggcacatgccaccatgcccagataaaaatattttattttattttttagacactgggtctcactatgttgcccaggctgcccttgaactcctgggctcaagcgatcctccccctgagtaactggcattacaggtgcaggccaccggctcagctaaatattttatttttaatgagtagtttatacctttacaactctgtaaaatctacactgcatttgaataattgaagtatcacgtaagtgacgcaaagaaggctatagttactcaacttacagaatttgattaataacaccaggtgcggtggctcacgcctgtaatcccaacaattttggaggccacagcaggaggattgcttcagcccaggagttcaagaccagcctgggcaacatagcaagacctggatactacaaaaaataaaaataaaaaaattagctgggtgtggtggtgtgtgcctatagtcccagctactcaggaggctgaggcaggaggattgcttgagcccagaaagtcaagacttcagtgagccattatcatgccactgtgctccagcctgggcaacagagcaagaccctgtctgtaaaaaaagaaaagaatttgattaataagtactcagcaactcttatttatttatttattgagacggagtctggctctgtcgcccaggcaggagtgcagtggagcaatcttggctcactgcaagctccgcctcccaggttcacgccattctcctgcctcagcctctggagtagctgtgactacaggcacccgccaccacgcccggctaatcttttgtatttttagtagagacagggtttcactgtgttagccaggatggtctcgatctcctgacctcgtgatccgcctgcctcagcctcccaaagtgctgggattacaggcttgagccactgcactcggcccttgcaactcttaattataaggcatgatagctgcaaagtactcagtaagactttgatcctgcctttaggaggccataacctatttgaagaataaaacaggtacacaaatacaagccagattactataagtgtcacaaaactggactgaatatgattggaatttgtggcaagaagcgatcacatctagttatagggtaggatggagcagtgcaaaagaaagtcctcctgaaggaagtagcactcaggcagggattgaggaaaggagccgtttagcaggcagaagtgggtggcaacacggctagccagcagaggatgaagaatggcacaatcgccttgctctaggagaggcttttaaagttttgcagagggctactggtccttaagaaatcattaaaggaccgcatatgtagaagtcaattcattccattctggacgtgaaactattcaatatagataaacaatgattgatggttgttaaataatcatatattaaactgttcaatataggtaaacaatgattttaaaggcagctggttctctatgaaggctaattaaggaaaagactgcagtaaagaaaggaaggaagaggagaaggaagaatacagagaaagacagggggaagaaagatttaaacacacatggagacaggcttctctggagctccctgcagctcccccgctctcctgtgtcttaggatatcatctctgctgatgtctgaagctagtttccataattaaataaataaacaaagatagtagttcttgaaatttgcctcaagctctaatgatattaagcctaaggctttttttttttttaattatactttaagttgtgggatatatgtgcagatcgtgcaggtttgttacataggtatacttgtgccatggtggtttgctgcacccatcaacccatcatctaggttttatgccccacatgcattaggtatttgtcgtaatgctctccatctgcttgccccacaacccccaacaggccccagtgtgtgatgttcccctccccgtgtccaagtgttctcattgttcgactcccacttatgagtgagaatatgtagtgtttggttttctgttcctatgttagtttgctgagaatgatggtttccagcgtcatccatgtccctgcaaaggacatgaactcattcttttttatggctgcatagtattgcatcatgtgtaagtgtcacattttctttatccaacacgtctattattgatgggcatttggattggttccaagtctttgctattgtagatagtactgcaataaatatatgtgtgcatgtgtctttatagcagaaggatttataatcctttaagccaaaggctattttagagtgttagtacattggtataagtgatcggtctgaaactctgcaatagagcagtatgctgctttcttactactgttttgtaggtaattattattagtggaaaacatatatgaacccagaaatagaaaaagtcatcctgattggaagaatttcttttactctaatatacatatgtaatgttactttggtttctgagttttctataaaaatattgcctttataataaaataataaaaaaataaaaataataaaaaatacaagtaaatgattgtcatagttgtgagggattcaatgtggagggaataaaggatcaaatgttataagaaatcttaaatataagtaaaaaataactgaaaaactacttttccaaaataggaaaacactgtccatttatttgttcctttcccttccagcgtgcaagaaaaacggaagtgagattccaacaggagggcaccactgtccctgtctgaccttaaaccaggagattttgtacagatgtattccttcaagaaaaccagcttgttggcagtaatagagaagaaatgagcttctcccaacaacagccaacaacagccaatgacaacagcaaaataggaaaaagggttgccctctgaaaggtaaataaactctatacacaataaatgaccatctgtggaagtaaaaccgagagacaggctttaccacctcccagaactccaatccagatgaccacggataaatctctagcacgcggaatagagatgtcacggctgttaggtaagcagagagtaatgcagggtatatattcctggaagagaacagggttagtcaaactggatctcagaaaagggagctgctgtacaagacattctaggaagcaagcctctgaattctgaaacccagacctgctggtcacggtggggcagggatgatcttccaagcttccctgcggtctgcatgaaattctctcacccacaccagcttcctgtgctccaattccatgcctctgactggtttccacttaagaattaatgggtaaaaaggaaaaagaattagtagtatgatcttgttgcttccccagagtcatcaataaaaaggcagaacagagagaaaacaaaacaaaacaaagttataccaggagacagaactgggagatctcagatcgtcttctctgtgaatcgggtgttgctactgaagccgtgataatcctggtcacctgaggcagaaaataaacatttcttcctacaaagaatgtgggcattttccagtgggatttgtgagccagcaaagacttagcagcagtttcttcactgccaaaaatctctaactttccatgatgaaaaactattgttgtcattgaccggctttacgaaatattggcttacgttttaatcatctgttgagcatcaggcactatcctgggcacctgtgaatccatttggtcctcgcagctattctatgacatgggcacattatcctccttcacagatgaagaaacaagttaaagagatgttcccaaaagagttaagttaggagcaaagttaatacttgaacccaaatctgtttccagggtttttatgcctttcactacacctgctttgcaggaaagtgatgagaatttctagtagacgctgagtaggggcggtgctgcacggcactcactgtttctgagatactggtgatgggacagataaccgagaaggagacactggtgaattctgaaaggaaggtgtgcctcagcaaaggccgcaggggaagacaggaggttcgctcgctcacctttatttggaaagccttcctcccacattccctagcaatgctagtcagtcccaggggtttggatggggctggctgcccgtggcccctgatccaggggttgggggcattgttgggagcagagtcctccatgggacttctgctagagcaatcagtgcagacgtgctcttgtttggggattgcgatctgaaggcccccagaagcttgcgactgcaggcagccatctgtccagagaccacctaatcaagaaacccctgacaccctcataggagacgcctgccatccagctgtacctagaggagatctaccaccccctctgtaactttcagttttgtgaatcagcacattcattctctctctctctcgatctctctctctctctccaaagtggcatttgtctagatggctcagagtgtggtcctcaatcttgcagattcggattcagttctgggacagcctcactaaattgcccttttccagcctgtttcctccctgtagacattggcagggtgcctggcaagcccagcccaggctcttgtctgtgacagatctgtcaccttttaactctttcccaggcttccttgtttacattaacatgtttccagccagagcggagagccgtaaacatcttgagggctggggcggtgtctgactcatggctggattcccccaagccaatgcagagcgggaacctagcgacactcaaacacgtttaagagtaaatttctgtttgagtcaccaaagtaaagaaatccagtccccagtaccaattgaaataaaccacaaaacactttgccgaatggaaacttgttctgcaatggtaaagcatgactttaactttagccaaattacttcccaggagttaaactaactcatgatctcactgtccactgaaaaaaactgttcttagtctgtttgagccattgtaatatagactgggtaacttgtacacagcagacatctatttctcccaggtctggaggctgggcatctgagatcgggaccagcatggttaggttctggtgagtgctcccttccaggctgcagacagctgtcttctcgctgtgtcctcatgtggtgggagggcaagcgagctttctggggcctttttaataaaggcactaatcccactcataagggcaccatcctcatgacctaatcacctcctaaaggacccacctcctcataccatcatcttgggagttaggattttaaccaattaaatttggggctgtcttctcgctgtgtcctcacgtggtgggagggcaagcgagctttctggggcctttttaataagggcactaatcccactcataagggcaccaccctcatgacctaatcacctcctaaaggacccacctcctcataccatcatcttgggagttaggattttaaccaattaaatttgggggacacaaacattcagaccacagcagctgtggtgcagactttgccaaggtctagtgcctccttctgtcatcttgcaggtgcagcccagagcagcaggagctgtgccctggcccctgtcctgaggagctcccactggtcagccccgcctactccagctggaccttgatgcttcacacaaggtgtgcgcagaggacacaggcacttcatggagcaacatacttttgtaaaaaaaatgaattcccttgtaacaaatagagcacggaggcttttatagattaagtaatttgtagtcttcttataattatggcttctaaattacctaaaataattcattcaaggcttgattttagttttgtcttgagagtgtcaactctttaacttgagatgctgtaggatggggtttcatcttgggattcttttcttggatatgtcatttaaattctgatacttatattccctatttgaaaacacatgatcaatgacaataccaatacctgatttgtgtgcaatacttataatttacaacgtacattattttaacatacattcttttcatgcgaccctctcaacaaccctttgacaaggcaagtcagagactaattactagagattattcaagcgacttgctccaagtcatacagtaggcaggcagccaagatgactctagtttttccaactcctagtcccacactctttcctctccccttacatgttctgatataaatcaaacttaggtttgaaaatatcttattgatgtatttcaacaccccagaatttgatgagactggaatcgatttgttgtgatctgtgattgctgaattcctcgtatgtggtggataccaaggtaagttgactagaatgtgagcttgcctacccagacaccagttcccatgtcctttgtccggtggtataatttgaagttcactctttttggtgtacagttttatgagttgagttgtgaaaaacatatacagttgtgtatccaccactacagtcaagatatagaacagttccattacctcaaaaatttttttcaggccgggcgcagtggctcacgcctgtaatcccagcactttaggaggccaaagcgggcggatcacgaggtcaggagatcgagaccatcctggctaacgctgtgaaaccatgtctctactaaaaatacaaaaaaattagccaggcgtggtggcaggtgcctgtggtcccagctacttgggaggctgaggcaagagaaccgcttgaccctgggaggcagaggttgcggtgagccaagatcgcgccactgcactccaacctgggcgacagagcgagagtccatctcaaaaagaaaacatcatactcttttgtagtcaaccctagctaggcccctatagttttgcctttcccaaagtatcttatgcatggaatcatccaggagataacctcctgaatcaggcttctgtctcttagcataatgcatttgggatttaccatgttatttcatttatcaggtttttgtcccttttcattgctgagtagtatttcattataggaatgtactctcgtttgtggatcattctgatcaactcagcacatgtggattatttccagtcttggcaatgatgaataaagtcactctaagcattcacgtacaggtttttgcatgaataaaatacctaggagtgagaaagctggactcacagtacatttttattccctcaatgctttcctgccccgtttagggctgatttcatcatgctttgatctcatcttagtcaactgatgggtcagcattgagcccacaagaggcttcatggcttcctggtaaagcgagagacccctggaagactgattctagaacagggtatgtgcattcctgctgccaagccctgctgcaccgttcctcattactcaattaatgtctggtgtcttctctgcctgtttaattactcccattaccgggacaggtcaagttccactccttcagggaagctccttctggccacctcacagcacagaacatgccgtctctttccaaatcactttgcatctgtcttctgccacgccatcctgctttgtgacatctttgagattggtgtctgtgtttttctgcattaaaccttgagggctttgtaggtacaggactgggatccccattgcacagatgtggaaattgaggccagagaggctaagtgactaagagaaggtagcatttgctgatcacccactatcatatgccatcaggcctcccattaacagtacacagtccgctcttctttagatgagaacactgatactcagagaggtgcagttatttgcccaagtcacacagctgggcactgaaagctggtttcatttggcttcaaacttagatctgtctgtggcatatctgggctttgagcaccctgtagcatgaggctgtagtgcactcggctttagaatggacaggggcctgtcttcccacacgctccaggctgcaccaccttttggtttttaggctaactcctgacctgagccctccccaccttcctgggcagagagtgaaccaggctgactgatgttctaggcaagaatgtggggtacccagggatgaccattgtgctgggtatgggagccagagttcagccctgactgctatggtctgaatatttccctccaaattcatgcattggaaacttaatccccagtgcagcagtattgggaggtggggcttaatgggaggtgtttagataatgaggcttcagcctcatgaatgaatgaatgctgctataaaaatgggtttgtaggccaggtgaagtggctcacgccagtaattccaacattttggcaggccagagcagaagggtattctagggtattcactgtgttgcccaggaactctagaccatcctgggcaacacagtgagacctcataaaaaaaacattagcccagcatggtggcacgtgcctgtagtcccagctactcgggaggctgtggcaggaggattgcttcagcccaggagtttgaggctacagtgaaccatgattgtgccattgcacttcagcctgggcaacagagcaagaccccatctctaaaaataaaaataaagtttgaaaaagaatttgtggaagtggattcaccctttctgccttccgccctgtgaggacacagaaagaaggccctcatctgatgctggtgccttaatcttggacttcccaacctccagaactgtgagaatacaaatttctgttccttaaaaaatgactcagtctgtggtgtcctgttatagcagcacaaacagactaagatagtaccctttcccttcccatgtgcccagggacaggcttccagaggagcccagcagctaactgggagcccctgggtttgcagtgtggggagctcccagaacagctgtgcctgcaggaaattggaggaggagaaaatattctggtttactctctattcagtcaccttctgcagctcaggcttttgatgtctaccattgcattgtttttcttttacctataatctttgtaaagatccacagtcccccacctagacgtgagaatcaatatctctccataaaatcaccctaactctatggcagcccgacatctttgttagaccagtgggaaaagctacataggtttccaccatccatgagagtcttctcagccttaggctaggccctgaagtcagggagttaggtgctgaaatgtgcacagctgaaggtaagccaccaacagggtgagccagatccactaacaactcaactggcctcctttgaactgtgaaaggaaaagtgttataataataactatcatttattgtgcatctacgatataccaggcattatacaaaacactacagtttgtcaattaattctcataaaagtcctatgaggcaaatgttcctatttttattttatattttatagctggagaaaatgacacacaggctctctagcctgaccatggccctcagtcaataagcagtacagttaaagttcaaacccacgtctcgggctccaagcccagacatttagcaaacactgtgtgctcacagctaagctttcataacagagcactggggacaatgtatggggaataaatgctctcttcgaagatgccctagcattctgtgatgcaatattgtgtgactgaaagaaacagtagtgtaggaattggaagactggatcttagtttgtggcaggattgtaccttactatatgaccttggggaattcacccaaactgcttttgcctccatttcctatttgatttctccattattcagagcatgaggaagatctgaagaatatatctaaattccaaaattaaatccaaacatctctcctgagaaaaccttctctttttttttttttgagaaggagtctttctctgccacccaggctggagtgcagtggcacaagctcagctcattgcaacctccgcctcccaggttcaagcaattctcctgcctcagcctcccgagtagctgggactacaggtgtgtgccaccacacctggctaatttttgtatttttagtagagacggggtttcaccatgttggccaggctggtctcaaactcttgacctcgtgatccgcctgcctcggcctcccaaagtggtgggattacaggcatgagccaccgtgcctggccaaaaaccttctttaagatgagaaacttgtgaggcagtagaacgtctcatcattaataaagattgactgtggagatctttaaaaaaaaaaatccagataagaaactggaaggagtaaaagatcatttgtttacatccaacacataactttcctagcaagtactcctacctgggacaaccccacactccatggaagaggcagaaacacagacaagaatgtgcctcaaatggctccaaatgctgccagcatccagcaaatgctgctgacaaaagagcagagagttgggctacaggtaggccaaccactgtcttggagcaggagtcctggtgggaggtgggcatgttattgtgatggatgacttccaacgtcacctgtagtatggagaagctctgctatttcagcactgagccctcactgttccccatttcttcctgggctctcttcttgttggccacttccaggcagagggggaaagcaccaagagcctttgaaaatcacagaatagattcaaaccctgagtttctcaattaccagctatttggctggacatcttagtcagcctctctgagccaccgtctccttgcgtggaccatggagatggtaacaattgaatgctggtagagggcactcataaacccataaagtcatagttcatgatgaaggactgaagtcttcccccaaggccaggtgcaagacaggcacctctgctgttgccatttctatgcaacattgtactgggatcctagtcagggcaattacatgagcaaaagaaataaaagaaattagtgttgaaaaggaagaagtaaaacttcagttttgcaaacaacataatcttgtatgtataaaattgtaagaaccacccacaaacacacataaaatgctattagagctaataaacaagttcagcaaagctgcaggacacatggtcaataaacaatgctggttgtatctctacctactagcaacgaacaatctggaaatgaaatgaagaaaataacttcacttacaatagcatcaaaaaaataacacacttacttaagaataaatttaacaaaagaagtacaagacttagactttgaaagccatgaaacattgctgaaagaaatatttaagacctacattaatggaaagacatctcatttagtacatgaattgggagacctaatcttactaatcttactaatgctcctcaaattgatatactcttacaatgtaatccctatcaaaattccagctgccctttttgcagtaattggcaatttgattataaaatatgtatggcaatgcgagggacccagaatagccaaaaacattcttgaaaaggaagaacaaggccgggcgtggtggctcacgcctgtaatcccaacactttgggaggccgaggcaggcggatcacgaggtcaggagattgagaccatcctggctaacacagtgagactccgtctctactaaaaaagaaaatacaaaaaattagccgggtgtgttggtgggcgcctgtagtcccagctacttgggaggctggggcaggaaaatggcgtgaacccaggaggcagaattgcagtgagcccttgagccgagatcgcgccactgcactctagcctgggcaacagtgtgagactccgtcacaaaacaaaaaaaaaggaagaacaaagttgaaggactcatacatcctcatttcaaaacttactaaaacttgcgtcatagctacaatactccagatgacatggtactggcatgcagatagacatctacatcagaggaatagaattgagagtccagaaataaccccatagatctatgatcaatttcttttatggtcaatttcttttatttatttatttacttatttacttacttactttttagagatgaggtcttgctatgttgaccaggctggtctcaaactcctagcctcaagcgatcctcccgtcttggcctcccaaagtgctaagattacaggtgtaagccaccacacctggcccaatttcatttttgacaaagatgccaacacagttaaatggagaaagaatagtcttttcaacaaatggtactgggacgactggatatccacatgcaaaagaatgaagctgggcttctacctcataccatatataaaaattaactcaaaatagaccaaaggcctaaatataagagacaaaactataaaatccttagaagaaaatgtaagagtaaatgtttgtgaccttggattacacaatggtttcttaggtaagacacttaatgcaagtacaagaaaagaaaggctaggtaggcgcagtggctcacgcctgtcatcccaacaatttgggaggccaaggcgagtggatcacttgaggtcaggagttcaagaccagtctggccaacatggcgaaacaccatctctactaaaaatacaaaaattagccgggcgtggtggcgggtgcctgcaatcccagctacttgagaggctgaggcacaagaattgcttgaacccaggaggcagatgttgcagtgagctgagatcgcaccactgcactccagcctggacgacagagcaagactctgtctcaaaaaaaaaaaaaaaaaggaaagaaagaaaagaaaaagtaggtaagttggagctcactacaatttaaaacttttgtgcttctgggccaggtacagtgcttcatgcctgcaatcccagcactttgggaggccgaggctggcggatcacgaggtcaggagttcgagaccaaactagccaacatagtgaaaccttgtctccactaaaaaaaaaaaaaaagaaaagaaaattagcagggcatggtggtgcgtgcctgtaatcccaactactcaggaggctgaggcaggagaatcacttgaacccgggaggcagaggttgcagtgagctgagattgtgccatgacactccagctggggcgacaatgcaagactccgagagagagagagaaaaaagaaagaaagaaaaagaaagaaagaaagaaaaaaagaaagaaagaaagaaagaaggaaggaaggaaggaaggaaggaaggaaggaaggaacaaagaaagaaaggagggcgggaggaaggaaggaagaaaggaaggagaaagagaggaaggaaggaaggaaggaagaaaggaaggaaggaaggaaggagaagaaagaaagaaagaaagacaaccagacttccagttttcagtctggcgtgtaaaaagtttgggagtcgtcattcccaccctaacaacaagaaagaagtttgacaagctgaaaatcaactgctcttcttagatcctgcagataattgaggtcatagggtaaattactgtcttacaaattggagagacagatggcagatacaaagaatcatgacttgattcactacttgagtggaagctcaagagcagaaacctttatgggaaccagtaccagggtaggaaaacttaaactgcaattgctgaattgctagaggctctgtttggactgcttgagagttaaaaactccagggagcccagtcttaggggggccccaacacttgtctgagttttacttccagaaggcttaccaggtcatcaaggtgaagagaaaaatcccttggtatttctgtcagtggggagggtgaaataagccagggcattctattgttaataaagcctgccctcaagagaaatgagtttaccagagcttaactgaggttttactaacgctaattgtcctggggaaagggaaatatcctagtctagtcccttctagctatcctgtcccaacaaagggggagacactgagaagtacttgtgaaggtcacagcacaggaacacaggctcattaaaagactgagatttaatcaaagaactagagaaggtttgttctgcccccacatcttaccagcacatcaacagggcttctgtgcaacagaggagacaaaactaacattagaggaacttttaatatctctgaaacatacaggtacatcaaataatcaaaacagcttaactctttgtcaaatacacataaagcatcataccaaaggcctatttgcctaggttctttttctcagtacctaatgtctggcttccaacaaaaaattacaaggcatcctataagacaaaaaatgttttaaagaaacaaggtaaccatcaaaacaagattcagatgtggcaaagatgttgggattatcagactgtgaatttaaaaacactataattaatatgctaagagctctaatagaaaaaatgaaccatatgcaatgagagatggatactgcaagcatagtgatggaaacaataaggaagaatcaaaaggaaagaaacgctagaaataaagaacactgtcatggaaataatgcatttgatgggcttttaaatagactggacacatggccgggcgcagtggctcatgtctgtaatcccagcaccttgggaggctgtggtggccagatcacctgaggtcaggagtttgagaccagcctggccaacatagtgaaaccctgcctctactaaaaatacaaacgtaagctggacatggtggcacatgcctgtaatcccagctactcaggaggctgaggcaggagaatcacttgaacctgggaggcagatgttgcagtgagctgtgatcatgctattgcactctagcctgggtgacagagcaggattccatctcaaaaaaagttaaaaaaaaaaaaaatagactggacacagccaaagaaagaatcactgagcttgaagacatgtcaatagaaacttcaaaaactaaatggtaagagaaaaaataattttaaaaagcagaacagaacatccaataactgtgggacaattttaaatggtgtgacatatgcataatgaatatcaaaacaagaaaaaaaagaaacagaaaaaatatttgaagtaataatgactgagaattttccaaaatgaatgacagacaccaaaccccagattcagaagctcaggaaatcaaagaggataaataccaaaaaaatttacacctagatatagcatattcaaaccacagataatcaaagacaaagagacaattttgaattaagtcaaagggaagaaaacactgtacctatgaggagcaagtataataattaatcagagttctcttcataggccacgcaagtaagaagagcttggagcaaaatattttaagtgttgacagaaacaacaacaaacaccaccaccagaatcctatacccagaaatattatccttgaaaagtaaaggagaaataaagactttcacagacaaacaaaattgagaaaacttgtcacaattgacataccttgcaagaaatgttgaaattcctcagaaagaaagaaaatagtatacatcagtgatatggttagactttgtatccccgcccaaatctcatctcgaattgtaagccccattatctcctcatgtcaagggagagaccagatggaaataaatgaatcatgggggcagtttcccccatgctattctcatgatagtgaattctcatgagctgataattttataaggggctcttccccctttgctcagcacttctcctttctgcctccttgtgaagaaggcaccttgcttcccctttgccttctgccatgattgtaagtttcctgaagcctccccaatcgtgctgaactgtgagtcaattaaacctctttcctttataaattacccagtcttaggcagttctttatagcagtataaaaacggactaatacagtaaattgttaccagaagtggggtgctgctataaagatactgaaaatgtggaagcaactttggaactgggtaacaggcagaggttggaacagttaagagggctcagaagatgacagaaggatgtgggaaactttaaaacttcctagagatttattaaatagctttgaccaaaatgctgatagtgatatggacaatgaagtccagcctgaggtggtctcagatggagatgaggaacttgttgggaactagaataaaggtgactcttgctatgctttagcaaagagactggtggcattttgcccctggcctggagatctgtggaattttgaacttgagagagatgatttaaggtatccaatggaagaaatttctaagcagcaaagtattcaagaggtgacctgggtgctgttaaaagtgtttgattttatgcattcccaaagagatggtttggaattggaacttcatgtttgaaagagaagcagagcatacacgtttggataatttgcagcctgatgatgcaatagaaaagaaaaacccattttctgaggagaaattcaaaccggcttcagaagtatgcataagtgacaaggagccaaatgttaataaccaagacaatggggaaaatgtctccaggacatgtcagaggtgttcacagcagctcctcccatcacaggcctagaggcctagaaggaaaaaatggcttcatgggctgggcccagggtcttgttgctttatgcagtcctgggagttggtgccctgcatcccagctgtggctaaaaagggccaaggcacagctcgggccatggcttcacaggatgcaagccccaggccttgatggcttacatgtgttgtcgggcctgcaggtgcacagaagtcaagaattgaggtttggggccaggcacagtggctcatgcctgtaatcccagcactttgggaggccaagggggatggatcacataaggtcaaaagttcgagaccagcctggcaaacatagtgaaactccgtctctactaaaaatacaaaaattagctgggtatgatggtgtgtgcctgtagtcccagctacttgggaggctgagatgggagaatcacttgaacctgggaagtggaggttgcagtgagccaagattgcaccactgcactccagcctgggcaacagagtgagactctgtctcaaaaacaaaaacaaaattgaggtttgggagcctccacctagattttagaggatgtatggaaatgcctggatgaccaggcagaagtttgctgcaggggcaaggccttcatagagaacctctgctagggcagtgcaaaagggaaatatagggtcagagccctgacagagtccccactggggcactgcctagtggagctgtgagaacagggccactgccctccagaccccaggatggtaggtccactgactgcttgcaccatgtacccagaaaagccacagacactccatgccagcccatgaaagcagctgagaggaggcctgtttcatcagcatgatctggatgtgaaacatggagtcaaaggaggtcatttcagagctttaaggtttgactgtcctgctggatttcaggcctgcatggggcctgtcatccttttgttttggccaatgtctcctatttgaaatgggtgtatttacccaatgcctgtacccccattgtgtctaggaagtacctaatttgcttttgactttacaggctcataagcggaagggacttcccttgtcttagatgagactttgaacttggacttttgggttaatcctagaatgaacaaagactttggaggactgtttggaaggcatgattggttttgaaatatgaaagggacatgagatttgggaggggccaggggcaaaatgatatgattaggctttgtgtccccctactcaaatctcatcgtgaattgtaatccccataatccctacatgtcaagggaaagaccggatggagataattgaatcataggggctgtttcccccatgttgttctcatgacagtgagtgagttctcacgagatctgatggttttatagagttcttccccctttgcttggcacttctacttccggacgccttgtgaagaaggtgccttgcttccccctttgccttctgccatgattatcagtttcctgatgcctccccagccatgctgaattgtgagtcaattaaacctctttcctttataaattacccagtgttgggcacttctttatagcagtatgaaaatggactaatacaatcagaaactcagatctacataaataatgagtattacagaaggaactcatgaagataaagtaaaatctcttatttttcttattctcaattgatataacataacagtttgttcaaaacaaaaagctacaaagtatccaatgattgtagcttatggataagtgaaaatgacagcaatgttattaagatatgaaagagaagaattatgaatactcagtggttaggtacttgcactacctgtgaaggggtagagtattatttgaaagaagacttggattcgttgtaaatgtttattgcaatctcaagggcagccactaaaaaggcaaacaaaaaaacataatttggccaggggtggtggcttaagcttgcaatcccagcactttgggaggccaaggtaggcagatcacttgaggtcaggagttcgagaccagcctgaccaacatggtgaaacctgtctctactaaaaatgcaaaaattagccaggcgtggtgcagcgcctgtaatcgcagctactcaggaggctgaggcaggagaattgcttgagcccaggaaggagaggttgtagtgaaccaagattgtgccactccagcctagatgatagagtgagactctgtctcaaaaaggaaaggataatttatatgctaagagaggagagaaaatggaattatataagtgctcaattaaaaccagagaaggagctggaggtggtagcacacacctgtaatcccagcactttgggagaacaaggcaggaggatcacttgaggtcaagagcttgataccagcctgggctcactcaacaaagtgagaccccatctctacaaaaaatttaaaagccacacatgcacacacacacaaacaacacagagagagagaaaagtcagaaaaagagtggaacaacaacaacaaaaagaaacaaagaataagaccaacaaatagaaaatagtaacaaattatattagtctgttctcctgctgctataggacatacccagaactggtttatttatgaaggaaagaggcttaattgactcatagttctgcagggctggggaggcctcgggaaacttacaatcatggcagaagggaaagcaaacacatccttcttcacgtggcagcaggaaggagaagtgcagagcaaagtgggggaagtcccttataaaatcatcagctctcatgagaactcactcactatcacaggaatagcatggaggtaacttccccatgattcagttacctcccactgggtccctcccatgacacatggggttatgggaactagagttcaagatgagatttgggtggggacacagccaaaccatatcagtctgtccctggctcttgccaaatctcatgtcctcacatttcaaaacacaatcatgcttgtccaactgtcccctaaagtcttagctcattccagcattaacccaaaagtccaagtccaaagtctcatctgagacaagacaagtcccttccgcttctgagcctaaatggaaagcaagttagttgcttcctagatacaatggggatacaggaaatgggtaaatacaactcttctgaatgggagaaattggccaatacataggagccactggccccatgcaagtctgaaatccaacagggctgtcattaaaccttaaagttgcaaaatgatcttctttgactccaagtttcacatccaggtcatgctgatgcaagtggggggctcccatcttcttgggcaactctgtccccatgattttgcagggtacagcctccctcccagctgccttcaagggctggtgttgagtgtctgcagcttttcgaaacacagagtgcaagctgtcagtggatctaccattctggggtctggactatggtggccctcttctcacagttccactaggcagtgccccaatggggactctgtggggctctgaccccacgtttcccttccacactgccctagcaggggttctccatgagggctccacccctgcagcaaacttctgactggacagttatttcttacagttatggaagctgagaaggccaagatcaagggaatgcatctggtgagagtcttctcactagtggggactctgcagagtcccaagacagtgcagggtatcatatagcaagggggctaagcatgctaacatactaaatcaggtctctcccatctgataaagccaccagctccactccaatgataacccattaatccattaacccatgattaatccatgtgtgagggcagagccctcatgatccaatgacctcttaaaggccccacctttcaatagtgctacactagggatgaagtctccaacacataaaatttgggggacacattcaaactatgagcagtatgctatctgatgacaacagaatgaaactaggaatcaataacagaaaaatagctagaaaactcctaaatatttgaagattaccacaacatacttctaaataactcatggatcaaagaattctcaagataaattttaaaatatttcaaattaaacaaaaatgaaaataaaggttatcaaaatttgtgggatgcagcaaaagcagtgcttaagaggaaatttatagcattgagtgtacatatcagaacagaatgaagacctaaaatcaataatctaagtttccaccttaggaaactaaaaaagaagagcaaattaaatctaaagtagtaaggaaaatagttataaaagctagagatagaaaataataaaaaatgaaagcagaaattaatgagataaagaattttaaaacaatagatccaattacaatagatgcaattaaaatctgtaattttgggggaaaataaaatagacaaattacgacctatatttactcaagaaaaagagaaaaagtacaaatgcacaaaataagaaatatcaaatggggaaataaccattgaaacagaaggtatttttaaaaacataacggggctacttttcagacctctgtgaaaatactgacaatctatatgaagtggataactttaagagagatagaatgtattgaaattgaccccatttagagacaaacagtttaaacagactaatttacttcgaagaaacagagataattatcaaggaactttcacattaaaaaacaaaaacaaaaacaaacaaacaaaaaaacctcatggtctcacaaggttttctaccaaatcttcaaagaccaggcagtcacagtacttcacaagtttttccagatcattgggaatgaaggaacattcctgaactgtttttagaaaataagtatagcattaacaactaaacttgataaaaacagcaaaaaaagaaaattacaaatatcacttacgaatattcatgaaaaagttctaaataaaaccctatttaacagaatacaacaccacactatgaaaatgatacaacataaccaagtgggatttgttcctggaatgcacactggctaaatattaataagtgaactaacacactgtatttacagatctaaggagaaaaatcatatgtttatttccatagatgcttttaaaaagccttttcaaattccttacctactcctgtttaaagaaactcaagagtgtgtaatttttgtttttttagtagagagaggatttcaccgtgctgcccaggctgatctggacctcctgtactcaagtgatctgcctgcctcagcctcccaaaatgctggtgttacaggtgtgagccacaccccctctctactaaaaaaaaaaaaaaaaaaaattagccaggactacagaaggtgtgaacctatagtcccagctactcaggaggtggaggctgcagtgagccatgactgtgccactcactctagcatgggtgacagagtgagaacttgtctcaagaaaataaaaaagaaaattttaaaactcaagaaatggccagaagtggtggctcgtgcctgtaatcccagcactttgggaggccaaggcggtggatggcttgaggtcaggagttcaaaaccagcctggccaacatggcgaaaccccatctctactaaaaatataaaaatcagtcaggtgtggtggagtgcacctgtggtcccagctactctggaggctgaggcaggagaatagcttgaacctgggaggcagaggttgcagtgagccaagatggtaccactgcactccagcctgggtgacagagtgatactgtctcaagaaaaaaaaaaccctcaagaaaataagttatattattcagagtatttttagagatagggtctcactctgttgcccaggctggagtgcagtggtgtcagcatagctcattgaaatctccaaatcctgggttttaagcaatcctcccacttagacctctcgagtagatgggactacaggcacaggccaccacagtcagctaattttttaatgtttttgtagagacagggtctcgctatgttgcccaggctactcttaaacttctggcgtcaagtgatcttcccaccatgacctcccaaagtgctggtattacaggcatgagccaccacccttgacctatcctttattaacatgtaaatacacatatgtgcactttcatacacacacactcccaccccaacacatacacttttagtgaaaaagccaccaactctttaatggggaagccccagaaactttccactaagatcgagaacaagatgaatttgcccaccatctccactactaatcaacattatactagagatataagcccaatgcaattagacaagaagaatcaataagatgcatgagatttgaaaaagtaaaactatatctagcagatgatacgagtgtacatacaaaaccctagaaaatcaataaaactaacaattcgataaggtagcaagctgtagaattatcttatagaacttgatagccttcatatacacaatgataaccagttagagtatataatggcatggaaaatgccatttatatggcaaaaaagaagataaagtatttaggaataagtactaataggaaatgtacaaaatccacgaggaaaattttaaaaacataaaagtgtacttgaacaaattgaaagacatttattgttctttgaatgactacacataataaaaatgtcaggtctccctaagttaacttataaatttaatgtaatcccaataaaaaatgccagcaagctttttgaaaaaatggaactagataagttgatgttaaacttcatatggaaaaataaacatgtaatttaggaatagccaggaaatcactaaaaaggaaaagctatgaaggtgactagcccaatcagacattgaaacatactataaaacctctataattacaacaatgtagtactagcacttgaataggtaagcaagtctattatagtttgtcaagtctgtcacagaaaaaacagaaataattttaaatacatatggaactttagtgtatgataagagtagcaactgaaatcactagggcaaaaatgcacttttaaataaatgatgctgggacaattggtttgccatttgggggaaaagatgaaactgagctacacctcatcacacctactgaaaaataaactccaaatgatcaggaatctaaatggaaaatacatccctacaagtattaggagaaaacgaggtgaatttctctttaacttgcatgtagggaaagacattctaattatgactcaaaatccagattcactaaatgcactaaaaacattgataaaactgattaaattaaaacaaaaaatgagggtttttggcatggcaaatatcaccataagcaaagtaaaaagacagccaacacactgggagaaaatatttacaacatatattaccccaaaagccagtggagaggctgggtgctgtggctcacacctgtagtactcagcactctgggaggctgaggcaggtggatctcttgagcccaggagtttgagatcagcctgggaaacaagatgagaacttgtctctacaaaacaataaaaataattagccaggcatggtggcgcacatctgcggttcaagctacatggaaggctgaggtgggaggatcgtctgagcccaggaggtggaggccgcagtgagttgtgatagtgacactgcactccagccttggtgacagagtgagaccccgtctcaaaataaataaataaatgaataaaggtttatttttaaaaatgtttatttacttatattttgtttttcatttttagagatgagggtctcgctatgttgcccaggctggagtgcaatggctatgcataggtgccatctcaccatctttgagcattgcagcctcaaattcctggcccaagcaatcctcccatctcccaagtagctgagactataggcatctgccactgcactcagcttagattttttttaacccgatagaaaaaaatggcaaaagataagaatggggaatttatacacagaaacacacacacacacatacatacacacatacacacacacacatacacacacatatatgaaagatttttcaacctaattcataagagaaatgtcaattaaaactacactaaaataccatttctcacctataatattttcttttattttgttttttaagacagaggctcactttgtcacccaggccagagtgcagcagtgcggtcatggttcgtgccacaacgccctgctaactttttgtgtttttgtagagatgaggtttaactatgttgcccaggctggtctggaattcctgggctcaagtgacccactcgccttagctgtacagtgctaggactgtaggtgtgagccactgcaccaagcctatatcttcaacatttaaaaaatataacaatacgctctgatggtaacgcagtggatagacaagcctctcatgcatggctaggggacatgtgaataagtacaaccctgtaaagggtaatgtggcagcatttcacaaaactacatatgcgggaggggcgcaaggtttcacgatggcggtggctgaggggttgacccagaggcccttacaaagtgaaagaggccgggaatcgccgcctccccacttctcacagtcctggggagcacagcagaagtgtttttctttcccccttttcttttttctttctttttttttttaaatgaacaagtaaaccacacaaattttcaacatgggacggagatctacatcatccaccaacagtggaaaatttatgaaccccacagaccaagtccgaaaggaatcccagaagagagaattaaagaacaaaaaacagcgcatgacggttcgagctgcagtgtttgttgttgttgttgttttggtttggttttggtatttttgaggtggagtttcgctcttgtcgcccaggctggagcgcagtggcgcgatctcggctcactgcaacccccatctccagcaattctcctgcctcagcctcccaagtagctgggattacaggcgcgtgccaccacacctggctaatttttgtatttttagtagagatgaggtttcaccatgttggccagactggtctcgaactcctgacctcaggtgatctacctgcctcggcctcccaaagtgctgggattacaggcgtgagccactgcgcccggccagagctgcgtttttaaaaatgaaggatcccaaacagattacccgggacatggagaaactggatgaaatggagtttaacccactgcaacagccacaattaaatgagaaagtactgaaaaacaggcgtaaaaaactgcgtgaaacctttgaacatattctatgactatgaaaaagaaaatccagatatttacaaggacttgaaaaactagaagtagagtatgaacagaagagggctcaacttaggcaatattttgatgctgtcgagaatgctcagcaagcggaagtggagagcattcttttgccagatgtgccgcgtgctccttccaacattttgatccaggacattccacttcctggtcccagccactctccatccttaggaaaacctcagcctatggacctccaactcgggcagtttctatccttcctcttcttgggcataatgttccacgtttgccccctggcagaaaatctcctggctcttccccggcccacctcctcctcaagtcttgcacatgtatggccgtaaagtgggttttgccctagatcttccccttcgtgggcgagatgaagaagacatgttatataatcctgaacttgcccggcaaggtcacggtgatgatgtttctagcgccagtgaagatgatggcccttctgaggacaaggaccaacataagcatggtaacaatactgatgatggtgacaccaacagatcagatggagaaagtgggaggatgaattgtgtaccgtgatgatggtgagagagacagcaatgaagaaaacaactcaggtctgagtgtacggtttgcagagatgcctggaaaatcaaggaagaaaaagaacatgaaggagttaagtcctcttcaagccatgatgcttccatggcaggtcaagaagtccctgaggagggaacagaagtagaggaattttcagaggacgatgatgaagatgattctgatgactctgaagcagaaaaacaatcacaaaaacagcataaagaagagtctcattctgatgacacatccactgcttcttcacagacaggcgtctgccacccagctaatttttgtatttttagtagagacagggtttcaccatgttggccaggctggtttcgaactcttgacctcaagtgatcctcctgcctcggcctcccaaagtgctgggattataggcatgagccactgcgcctgttcctgcatttacctttgaatcagcaatccctcttctaggaattcaccctgaagatacacttccaacagtaagaaaatccatttgcacaaggtttattattgaagcattgtttgcaattgcagaataatttatacatcttaaatgccacacacgtgttcctctttctcagatacaagcacgtcccatcccaggaccaccatctcttggaccaccacctgctccaccattatggcctcttgggccagctatgggccttcctcttggcccacctccaggagctcctccattcctgagatcacctggaatgccaggattctgagggcctttaccccgactttttacctccaggaccaacaccagcctgacctggccctcccccaggtccacctccaggtctgcctcctggtccccctcctaggggacccccaccaaaagtacctccccctgcacctctgggtgttcctccacctcatcctggcatgatgcgcccaccattggtacctccacttggacctgcccccgctgggcttttcctaccagctccctggccgaaccctggggttttcaatgcaccgcccaacttgattcagtggcccaaggcagatgatatgattgcagccaccattgagaagaaagccacagcaaccatcagtgccaagccacagatcactaatcccaaggcagagattacttgatttttgcccactgcactcacagtacatcaggagaataaaggggctactgctgctctccaaagaaagtcagaggggctgggcactgtggctcacacctgtaatcccagcactttaggaggccaaggtggggagatcacctgaggtcaggactttgagaccagcctagccaacatggcgaaaccccccatctctactaaaaatacaaaaattagccaggcatgtacacctatagtcccagctactcagtaggctgagggaggagaatggcttgaacccagaaggtggaggttgcagtgagctgagatcgcaccactgcactccagcctgggtgacagagcgagactttgtctcaaaaaaaagaaaagaaagtcagaggatgattctgctgtgcctcttgccaaagcagcacccaaatctggtccttctgttcctgtctcagtacaaagtaaggatgatgtctatgaggctttcatgaaagagatggaagggctgctgtgacagcttttgatgcccgaacaggattttgttcacaacagtggcccatggagaaagaggctcttattaaacttagaagaaagaaccgcttccgttgtcagggtgttttctaatttcagttcaaggaatatcctaaaatatagccttgttcagaatttactgcacagaaaagagggtatttcattcagaatagatcagttattgaagcagtgctgccaacgtccattccctttcacaccaccattttcaccctgtttctttcccttctccagttctttggaaatttgtgatcagggaatcttagttacttatttgttttgactctcttcttgtgtgctatgggcactggagtagagatttctgaaaaaccagtttatctcatcttgccttttgtgtttcagttatttttaatactttcctgtaaatattttgcaatattttacttatagtgaaatggatcacaatatagtttcctaatacaaagcaggatatgtgggaagaaaatgtacaattctttgattaaaattatttcccactgaactaaactttgattcatgggaaaaataaataaatgttctacaccaagaaaaaaaaactacatacgcatttaccatttttgttttgttttgtttttggttttgagacggagttttgttcttgttgcccaggctggagtgcagtggcatgatcttggctcactgcaacctctgcctcccaggttcaagtgatttgcctgcctcagcctcccaagtagctgggattacaggcgcccaccaccacgcctggctaattttttgtatttttagtagagacagggtttcaccacgtcagccaggctggtctcaaactcctgacctcagataatccacccgcctgggcctcccaagtgctgggattacaagcatgagccaccgcatctggcctgctgtttttgtttgtttgttttgttttgttttaagatggagtctcactctgttgtccaggatggagtgcaggggcaagatcttggctcgctgcaacctctgcctcctgggctcaagggattctcctgcctcagcctcccaagtagctgggactacaggcatgtgcctggctaagttttgtattattagtagagacggggtttcaccatgttggccagactcgtttcgaactcctgacctcaagtgatcctcctgcctcagcctcccaaaaatgctgggattataggcatgagctactgtgcttgtccctgcatttacctttgaatcagcaatcccacttccaggaattcaccctaaagatatacttccaactataagaaaacccatttgcacaggtttattattgaagcattgtttgcaattggaaaataatttaaacaacttaaatgccacacatctaacagtgcttaaatgaactatggtacatttgcagaatgggctaccatgaggttgtaaagaatgaggaagacctcaatgaattgataaaatttccagaatttattaaagaaagacaaagtgcaaaggattatctacagtataatatctactgtgtaagaaagaagaaaaaataagaaggaaaaataagaaaatacatatgtgtctgttcatttcagcaaaaaagaaacacaggcaagataaaccagaaactgaaattagatacctacaaggaatgtcaagaaagggatgaaaaacacaaaggaaacagggataagagaaaggcactttcctaaatataactttttgtgcagtctagactttggaatcatgttagtgttttacatgcttaaaagagaaaaataaataaaatcggccaggtatggtggctcgcacctgtaatcccagcactttgggaggccgaggcgggaggatcacttgaggtcaggagttagaggcaagcctggccaacatggtgaaaccccatctctactaaaaatacaaaaattagctgggtgtggtggcacacacctgtagtcccagatactcgggaggctgaggcaggagaatcacttgaacccaggaggcagaggttgcagtgagctgagcttgtgccactgcactccagcctgggtggcagagcgagactccgtctccaaaaaaaaaaaaaaaaaaaaaggttttctcagagagatgttcggatttcattttggaatttaaatatgttcttcagatcttccttgtgctctgacctaatatatggagaaatcaaacaggaaatggaggcaaaagcagtttgggtgaattccccaaggtcatatagtaaggtacagcccgccacaaactaagatccagtcttccaatttctatactgtttctttcagtcacacaatattgcatcacagaatgctagggcatttttgaatggtggcgcgtgcctgtaatcccagctactcgggaggctgaggcaggagaatcgcttgaacctgggagtcagaggttgcagtgagccaagatcacgccgctgcattccagcctggcgagagatagagactccgtctcaaataaataaataaataagaaatcaacaacgataaggacaatcttatacaaactaaagtttgatacaaaaagccccaaatgaatgaaactgctcatcaaatgaacaacataaccacattgaaggatggttggggaaaaaacacaagcaacacaagattaagtctctatgccgtcaggttccaaacccaaacatccctaacacaaagttaactctaattaaaattagagttaaatgaaaattagagtcatctaattagaactcgaattaaaattaaaatctaattttcacagaggcataaactaacaggtctgaaatgactttcgtacatcctataagggagcaaataagaaaatattaatatattgtgtaaaatgggagccagttttctcattgtcaaagaatgaagttgtgaacataaaatagatgataaaataaaccttgtgggctgcatgcagtggctcacgcctgtaatcccagcactttaggaggacaaggcgggcggatcacttaaagtcgggagttcgagaccagcctggccaacatggtgaaaccccatctctactaaaaatacaaaaaattagctggtcatggtggtgggtacctgtaatcccagctactcaggaggctgaggcaggagaatcacttgaacctgggaggcggaagttacagtgagccgagattgtgccattgcactccagcctgggcaacaagagcgaaactccatctgaaaataaataaacaaataaaccctgtgtagagatttcagtgtgaactcatggggatagatagatagaaagatactgttggaatggatatagatgtaggaggatatgtaggtgtgtgtatacacacttatataatgctacttctatcacagatcaagttctcagtaatatttttctaggctctgtattccattccactggtatatttttctgttcctgtgcctactgcactgttcttataaattctctttgatatttttgtttctttattctttgacatttattttaccattagtttgtacgtttccatgaaaaatctggttaagaatttgatttaaaataggttaaaccggccaggtgccgtggctcacgtttgtaatcccagcactttgggaaaccaaggcaggaggatcacttgagcccaggagttcaagaccaggctgcgcaacatagtgagaccctgtctctacaaaaaatttaaaaaaaaaatattagccgggcatgatggcaggtgcctgtagtcccagctactgggtcggactggggtgctgaggcaggaggatcgcttgggcccaggaggccaaggctgaagtgagctttgattgtgccactgaactcacctgggtgacagagtgagatcctgtttaaaaaaaaaaaaaaaagattaaattaataggctaatacaggcagaatttacatatttcataagataatccctaagcattgcatatttttatgctattgtaaatagtattcttgtttcaacttccaaatgtttgtctctaagtatataaaaagatcattgatttttttttttttttttgagacagaattttgctcttgtagcccaggctggagtgtagtggtgtgatctcaactcactgcaacctccgcctcctgggttcaagagattcttccacattagcctcctgagtagctgggattacaggcgcctaccatcacacctggctaattttttttgtatttttagtagagatgaggtttcaccatgttggccgggctagtctcaaactcctgaccttaggtgatccacctgcctcggcctcccaaagtgctgggattacaggtgtgagccactgcgcccggccaattgattttttttttaatgtatcaatattgtattctgcaatttgtattcacccttcctccatccttttgttctgtctggtcccttgatgggtatatgaggcccacccacgttggtgggggtggatctgagtctacagcttcaaatgctcctcgttcctggaaacatgcccacagacacacccaaaaatgcttaaccagtgacctgtcatcccttaactcagctgacacctaaaattaaccaccacgttttccaaatatttgagggttttccagactctttttctattgatttttaacttaatcacactgtgggcacagattacagcttgtatggcttaaatacttaccaatgtactttccaatggacttgtagggcctgaaattgattccgtcttggcaagtgatctgtgtatttgaaaataatgcttatactgctgttactcagtagagaattctgtaaacgtcaattaggtcaagttggttaatagcattgttcaagtcttctatatcttcattgattttagtctacttattctagaaatctacagaaaaatttcctagaactgagtttagcatgactgaggaatgatatataaaaactgatatataaaaatgaattatatttttatatactaccaacagacatttggaaatttagataaaaacttgttacatgatgtcaaataaaaaatctggaactcaagttcacagaatagacaatgttaagaaaaataagaagaaaaaatctggacttagtaaagggagactttatttgaaaggattgttgcaaagtggtggggaggggtgtactattgcagcagggagaatgcactgaacataagatctgtttgtctcagggttagacaaaaggggttttcttttatagggaggggaagcaagtaaaagacaggaagtgggatgaaggggagtagcatggtgggacagtagatccaatcagtgacttaccctgagtccagtctattctctcgaggggtggaggggagggtgagccaaagtttgtaaagcaaagtctggttcacaagcattttgttcccattgatcactggggacaagcagtttagctaatttatgaggcaaagaatgggaatttggaaggcctgtgtctggcctcgactggggtcttcaaggggagcattcatgagtcataccaggaaggatggttctctgcagtaagccattttccagaacaccaaggacaagggattcctttaaatgtatctatttcctaggatcacagtgctcaggtaaaattcaacattgtcagtagacaagaaaacaggggccagaaatgtgaaaatacaggaaatgctcagtattgtttgaggatctcaagtgtaaaggcaagacaggaggtagactgaaaagagttacagtcaagtttgaacatttgagtgccgacccatcagggttacatgacaggcgagtctgtgggctcaagcccgcacctcagacagggctgctcgggccccctactcctagcgagggccctgttgctggttcctggggcttgcactgatagtggctagatgcctggcagcaccagctactgaccagactatgagagtgtgtttgtcaccaaaaggtcagctcagagaggcggtatgtggggcaggtggctcttgcttcaaagccccctgataagagaggtattaggttggtgcaaaggtaattgtggtttttgccagtaaaagtaatggtggccaggtgtggtggctcaagcctgtaatcccagcattttgggaggccgaggcgggcggatcacaaggtcaggagtttgagaccagcctggccaatatggtgaaaccccatctctactaaaaatacaaaaagttagctgggcgtggtggcgggcgcctgcggtcccagctgcttgggaagctgaagcaggagaatcgcttgaacccgggaggtggaggttgcagtgagccaagttcgcaccactgcactccagcctggacaaagagtgaaactgtctcaaaaaaaaaaaaaaagtaatggcaaaagctgcagttacttttgcaccaacctaatactttcttctcctcagtctgtggctgcatcacagagagtagcccacctgtgctagagctgaggacaggaagctgctgccgagctgtggggatggggagggactccacttggaagccttatgtagccagggtttcaacactccccaagtgtgagcgctgtttcctgttacaggcagagtgggcttcctcctcagaatcacaagtctttctgcaaggcgaatatgccttatgtgtgcctacctttcaagaagcaatcctacctggcctgtctattcctcaacacctttgctttcataccaggaacataaaagaaaagcccaaagccattaaaaataaaggaagtagcaattaaaacacccaagggcactaaactgctattagaagaggaatctagcctctcagcaatttctaaaaacgtactttgagggagaaacaagaggtcactctctcagagaagatgaggcaccaggagccaacctggaaggccttcatgacgtgggtgtctacctcggacgaggctgtaggaacagctgtgaccaccagaacagcaggaagctgtgcggttgaagccccagtctgaatccaccaggctaagctgtgagcagggaccacagtcaactacccaggctcttccctctggctggatcaccctccccgttccccaggcctttcctgccaacgtttcttctatctcagggtacatctctctggtagctccctggggatgggctccatcttactcatctgtgcttgctacaaagtagggccttgatggaggttggtcatccagacataacccatgcccaggacgaagcataaaaacacttgtacaatgaagactggttcaatggtccattctgtttattcagaacggtaacataaatacaccttaaatattaacattttttatatacagaaatgaccccactccccaaaaagtttgaaaaaatattgtctcctcctcctttataaaaccctagatgacctatgaaggcacagccaagcccttgatgcatcttcctcagcacaatttggccaacgctggagggaaggtcaaagaggtggaaggaaaatgttatgctgaaaatccctttccaacaagggtgccaagcgccggtcttgaacgaagtaccctgcctaagcatcatttcctaaagcgcttgaagagcgggtgtacatgtttgctgggcgccttgctccgcgatgagtggtactccatgtacacagtgtcgtcggccccagacatagaactcatggtgccaaagcgccgagatgcctgccgggaagggggaaccagcccatgttagtctccagaagaaaagatactccttttataatacttataatcacagcaaattttataagacttacataaatttaatacatcatttttaataatgtttacagatcgcttactgtctcaggcattgttctaagcattttacatgcattatctcctctaatcctcaaaactactataatccacacctgaaagaagaggaaactgagacacagagagattaactaacctatccaagatcacatagctcttaaggagatgggatttgaacacccaggtagcctggcttcagactgttcttaaccataatgccacactacctcacttaataacaacttctgaacaaactttttttttttaagagagaaacagggtctcgatatgttgaccatgctggtctcaaactcctggactcaactgatcctcccgcctaggcctcccaaagtgctgggattacagacatgagccaccatgcctggcctgaacagaattttttaacagttagggcaaaagttccttaaaatctcctgagacaccaccataaggctttgaatcaagtggaaggacagaaagccctgggcttgactcttggctcctcctgtccctgagtaaccctgaggcaagtaattaatgtctgcacctcaatgacctcatctgtaaaatggggataaccacatcagtgctgacattgctatcctgtgaggagaatgaaccaggcacctccttaaaaccagtgagagcaatgagagcactctcctgggttcccatggagagtgccccctgggtcgggggaggaaagccttaggctggagggagggcagccccttcccagggacagctgtttccttcttgccttggtccagcagttgctcaccttccggctctaatggcaactgaatttcaaacgcacctgactgaagtgcacttctccccttggacaggcctgctaattctccataatgatgctctcactaattagaccatatatttacttggcctagagcaggcatatttgtagaataaatgaaaggttgagtattttcacagaactctacatttttcaaagttaagtatcgaagctaccacaagagttgatcctcagagcagtcttaggggctagagggctcagctttatcactgaggaggaaccagaggagaactgtgtggccacagccagggatggcagccctgtgtgtgggaactacgtacccccagcccatcatgctccctccagtcaccaccaaggtgagctggggtcacctgcttgccatcctgggcttcaacatcaagatttaacaaatactcgtgtgagcaaagcaggagaccagtcacagccactgtgagctcagctgtgtgcaacagtacaaggggcacacaccaaaagggcaacaaggattgtttctgttcatctcttccgtgttttccaacatttccaaaaaaatcccatgggcccatccaggcaggactacatgtctgtgtctgtgtctacaaacgctgccctgtgagagcactgacacctggaacctcctcacccatttactcacctggctggatctggagccaaattccccagccaccacctcctcctcggcatccaggtcagtggctgccaggactttctgtaagagctgctgttgctcttcttttgtcgaaaacgccaagtcttcctcctccatgccagcgagtttcgtgatcacctgcaaagcccaagccagcagacatgcccctttctgctctctctccccagccctcctctgccttctcctgggtccacctgctttggtcacttccctccccaggcccagccaccctggtggccaacaatggagagctcctccctagcattccagagaccagcatcaggagccgcctttaacagggagcttgactaatgatctcaagaccagagggatgcaggaatttcagagaaatctgcccccagcacacagcatctaaatgatcatgtatggaagatcaacaggaagaatcttagtgattttaaaaggctccttcgggtagccttcacatcttggagcagacaaaggaagggacaagtgactggaaggcacaggctgtggccctttgtgaaggtccctggcatctgctgtgctccgcaactggggcttccagcaggaatgagcacgtgaaaatgaaaatgataggatatcaggaagattatttatagagcttctctgagagagtaagaacagcatggtggagactgggttttcatttctatggggataacttactacaagggctccctatccctgcagaaaacttgggttgattctgtaaagggaattctccttccctccaattctcataatgttcattaaatgaaaattcctagaagtaaggatctgagtccttctgggccagggatccagagtacagacgatgtgcacatctgcccaggcccagccactccacgtcatgactctgggaactccaaccactgctcctcaacaggcagcaccgaagacacagctccaaccaacacaaactactacggcatggcattgtgcctttttgtcgaggtcacctttcaaagaattgctctttctgacctggtgctcctcttaccctcacagctcggcaggaatcaggaggtaggaatgctattaccaacagggattttcatggatggataaaaaggtcatgatgcaaatcctccaaaaaactgggctcaaaacccaagcatcttgtcctctaggccagcatgagaggtctgaagtgtcactgcctctagctaaaagagggaaggtcagacaaccctgtcctcctaaggccaataatgggaactctcaccaatgcataaagagacacattaaaaacgtatctcaaaaggcagcctggattgcagtcttttgcaatcaagaacctgggagtctaatgttctagggatgtccttttagtggaccatagggggaatttaattcccctacttctagaaccctccatctatccccaaaatataaagccctctggacaccaaatactgacataaacgtaatatttgtgtaacaggaaagaaagcaaatgcctcagccagtgaaagttagccaaagctttagaatttcccaattattaaaatacctgatttgtagtacaggatagctctgatgtctgggaggcaaactgaggcaaactaaggcctggagcttaccagctgatgaaaggaagagctctcctagctacctagagaggcatccctgagaaagcagccctgcggggctcagattcacacagtgctggtcatagtgccatggcacctcagtcctgccaggacggcacactttccaccaacagctgccctcagagattcatgcagagataaagggagtttgaggcaaggcctctaatctcctaatgcttggtgcctgcctgctgacagtggccctcgcttctcctggaggccagggtatcaagaaggccttggtcctagtctaaccagaagccaaatggatatgtaccttgaagctataaccttgatctaccaagaatctctgccgcttggttgagtaagccatttcctgtgtgtcctgggataccagtgagtagaaaaaggcattgtactcttctgcaaccatccctgcaggaaaaaatgagaaacggcaataaagaagacaacattagccattagaatgccaagagctaagggtcccaggctcaaaagcaagcactggagtggaaaagccctgcactcggggttaccacctgaacttggcatgggattgcatcaaaatttggaagtcttttgtgcttccaaggacaccatcaagtgaaaaaacaatcctcagaataaaaaaatgtggaaagcatatatctgataagggatttgtatctaggttatacaaagaactgttgaaactcaacaacaagacaaattaattataaatgagagaagaatatgaacagattacttctccaaaaacaatataaaaatagccagtaagcacatgaaatgatgctccacaccattaatcaccagggaaatgcaactcaaaagcacaatgagattatcacctcacgcccctctccgaggatggctacaatcaaaaaagcagataactgccactgttgtcaaggatgtggaaaaactagaacccgcatgcattgctgttgagaatgtaaatgatgcggctgctttggaaaacagtctggcagttcatcaaaatgttaaacacactgttataaccacatgacctggcaattccacttccaggcataaatccaagagaaatgaaactatatccacacaaaaatttgtacatgaatttcatagcagaattcttctaagagccaaaaagtggaaacagcccaaatgtccatcaacagatgtgtggataaataaaatgtggtatgtccatggaatcgaatattatttagcaataaaaaagaatgaagtactgacagatgctacaatatagataatctttttgaaaacattatgctgccgggtgtggtgacccagtcctgtaatcccagccctttgggaggctgaggtgggcgtggatcactcaaggtcaggagtttgagaccagcctggccaacatggtgaaactccatctctactaaaaatagaaaaattagccaggcgtggtggctcatgcctgtaattccagctacgcgggaggctgaggcaggagaatcccttgaacctgcgaggcagtggttgcagtgagccaagatcgccccactgtactccagcctgggcgatagagcgagattccatctccaaaaaacaaacaaacaaaacattatgctaagtgaaaagaaaccagtcacagaaggccccaagtggtctgactgcatttacatgaaatgtccagaaaaggcctacagacatcaaagtagattaggggctgcctagagctgggggttgggaacaagaggaaattaggagtggctgtgcatggatgagggtttcttttgggagctgatgagaatattctaaacatgaattgtgttgatagttgcacaactttgtgaatattgtatttcctaggttttcttcgaggatccttatagtttgaggtcttacatttacatctttaatccattatgagttgatttttgtatgtggtgataggcaggggtctggtttcatccttctgcatacagttagccagtttccccagcaccatttattgaatagggagtactttccccactgcatatttttgccaattttgttgaacatcagttggctgcaggtacatggcattatttctgagctctctattctgctccattggtctatgtgcctgttctgtaccagtaccatgctgttttggttactgtaagccctgtagcatagtttgaagttggatactgtgaggcctttggctttgttccttttgcttaggattgctttggctattcaggtgcttttgtggttccagatgaattttataagttttttttctaattctgtgaaaaatgatgttggcaatttgatagaatagtgttgaatctgtagattgttttgggcagtttggcaattttaatgatattgcttcttccaatcctcaagcacagaatgtttttccatttgtttctgtcacctatgatttatttcaggagtgttctgtagttattcctaggttttgtcttttgtttttacagctattataaattggattgtgttcttgatttggctctcagcttgaatgttactggtgtatagaaatgctactgatttttgtacattgattttgaattccgaaactttactcaagttgcctatcaggtctaggagccttttggtggagtctttagggttttctaggtatagaatcacatcattagggaagacagataatttaacttccttttttcctatctggatgccttttatttctttatcttgctagactggtctgagtagaactttcagtactatgtggaataggtgtggtgagggtgggctctttgtcttgttccagttcttttttttttttttttctgggggacggagtctcgctctgtcgcccaggctggagtgcagtggcgtgatctcggctcactgcaagctccgcctcccaggttcatgccattctcctgcttcagcctcccaagtagctgggactacaggtgcctgccaccacgcccggctaattttttgtacttttagtagggatggggtttcaccatgttagccagaatgacctagatctcctgaccttgttgtgatccgcccacctcggcctcccaaagtgctcggattacaggcaagagccaccgtgcccggctgtcttgttccagttcttaaagggaatgcttccagcttttgcttacttagtatgatgttggctgtgagtttgtcatagatggcttttattattgtgagatatgttccttcgatgccatttgttgagggtttttatcatgaaggaatgttgaattttatcaaaagctctttctgggctgggcgcagtggctcacacctataatcccagcactttgggaggccaaggtgggtggatcacctgaggtcaggccttcaagaccagcactgccaacatggcgaaaccctgtctctactaaaaatacaaaaaaattagctgggcatggtggtgcgtgcctgtagtcccagctacttgggaggctgaggcaggagaatagtttgaatctgggaagcagaggttgcagtgagccaagattgcaccattgcactccagcctgggcaacaagagcaagactctgcctcaaaaaaacaaaaaacctttttctgtgtctattaggataattatatgcttttcatttttaattatgtggtgaatcatatttattgatttccacatgttgaaccaactttgcatcccagaagtaaagcctatttgattgtggtgaattaactttttgatatgctgctggatttgctttgtcctcattttgttacagatttttgcgtctgtgttcatcaggaatactagcctgtagttttttcatcgtgtctttgccagattttggtatcaggatgatagtggtttcgtagtatgagttaggaagaagtctctcctcctcaatttttttgaatagtttcagtagaactgaatacatctggtccaggacttttttagttggtagatttttttttttttttttggaggcggagtctcactctgtcacccaggctggagtgcagtggcacgatctcagctcactgcaacctccacctccagggtttaagcaattctcctgcctcagccttccacgtggatggaattacaggcacacgccaccaagcccacctagttttgtatttttagtagagacgaggtttcaccatgttggtcaggctggtctggaactcctgacctcaggtgatccacctgcctcagccttccaaagtgctgggattagaggtgtgagccaccatgcctggggccatattttttttttaaattactgattcaatttctccttattgatctgttcagggtttcaattaatttctgattcaatcttgggaagttgtatgtttccaggaatttatctatttcctctagatttactagtttgtgtgcacagaggtatttttaagtctctgagaatcttttgtatttctggggatcagctgtgatgtcacctttgtcatttctgattctgcttatttggatcttctcttttctgttaatctaactagcagtccatcaatcttatttatctttttttttgagacggagtctcgctctgtcacccaggctggagtgcagaggtgcgatctcggctcactgcagcctctgcctcctgggttcacgcaattctcctgcctcagcctcctgagtagctgggattacaagcatgcgccaccacattcgactaatttttgtatttttagtagagacggggtttctccatgttggtcaggctggtcttgaactcttgaccttgtaatccgcccacctcggcctcccaaagttccaggattacaggcatgagccactgcgactggccttatctatcttttcaaagaaccagctttttatttcattgatcctttgtattgtttttgagtctgaatttcatttagttctgctctgattttagttatttcttttcttcagctagttttgggattagcttgttcttatttttctagttccttcaggtgaaatctcaaattgttaatttgaaatctgtcttctcgatgtaggtgttcagtgctataaactttcctaacaatacctttgctgtaccccagagatttagtatgttgtatctgttttcatttgtttcaaataatttttgattcctgccttaatttgtttatccaaaagtcattcaggagcaagttgtttagtttctatgtaattgtgtgggtttttttttttcttttttcttttatttagcgatgaggtctcgctatgttgcccagaatggtcttgaactcctgagttcaaatgatcctcccactttggcctcccaaagtgctgcggttacaggcatgagccactgtgcctggccaattgtgtggttttgagagttcttcctggtactgatttctacttttattccactgtgacccaagaaaatgcttggtatgatttcgacttttttgaatttattgagtcttttttttttttttttttttttgagagagtctcgctctgttgcccaggctggagtgcagtggcgcgatctcggctcactgcaagctccgcctcccaggttcacgccattctcctgcctcagcctcccgagtagctgagactacaggcaactgccaccacacacccggctaattttttgtatttttagtagagacggggtttcactgtgttagccaggatggtctcgatctcctgacctcgtgatccacccgccttggcttcccaaagtgctgggattatcggcgtaagccaccacaccctgccgaatttattgagactttaataaagtcgagcataaagtctcacattgctttatggccaaacacatgatcaattattttttttttttttttttttttttgtgacagagtcctgctctgttccccaggctggagtgcagtggcatgatcttggctcactgcaacctctgcctcccggcttcaagtcagttctcctgcctcaggctcccgagtagctgggactacaggcgcatgccgccacactcagctaatttttgtattttagtagagacggggtttcaccgtgttgcccaggctggttgcaaactcccgagctcaggcaatctgccggcctcagcctcccaaagtgctgggattacaggtgtgagccacggcaccaggcccatgtgatcaatcttaagagtatattctgggggcagatgagaatatatattctgtggttgttgcgtagagaattatgtagatgcctattaggtccaattggtcaagtgttgaattttaagtacagaatttctttgttagttttctgcctctataatctgtctcatgctgtcagtggggtgtcaaaatctcctaccattgttgtgtggctgtctaagccttttcctagctctaaaagtacttggtttatgaatctaggtgctccaatgttgggcgcatatatatttaggatagttaagtcttcttgttgaattgaaccatttatcatcgtgtaatgacctttttgtccttttttactgtggctggtttaaagtctcttttatctgatgcaagaatagtgaccccctgccccactctttttttttttttatttgtgtgatagatttttttccctatccctttactttgaacctatgagtcctgttacatgtgagagaggtctcttgaagacagcagaaggctgggtcttgtttttaatccaatttgccactccaagtcttttaggtggggtgtttaggttgtttacattcaaggttaatattgagacatgaggctttattcctaacatggtgtcattagctggttgctctgtagtttggattgtgtagttgctttacagggtctgtgggctatgtgcttatgtgtatttttgtggtagcaggtgtcaccattctttcatttccatgtttagaactctcaagactctcttgtagggccagtctggtgataacaaattcttttagcagttgcttgtctgggaaagattttatttcttctttgctcatgtagcttagtttggcaggatatggaattcttggttaggatttttcttttttattttttttcttaaagagactgggtctcactatggttttttggtttttgtttttttgttttgagacagagtcttgctgttgttgcccaggctggagtgcaatggtgcaatctcggctcactgaaacctctgcctcctgggttccagcaatactcctgcctcagcctcctgagtagctgagattataggcacctgccaccacgcccggctaatttttgtatttttagtggagatggggtttcaccatgttggccaggctggtctggaactcctgacctcaggtgatccactcacctcagcctcccaaagtgctaggattacaggtgtgagccaccgcgcctggcctgtttttttgtttgtttttgttttaaacaggatcttgttctgttgcccaaggtggaataccgtggtgagatgtcagatcactgcaacctctgcctcccagactaaagcgattctcttgcctcagcctccggagtggctgggactacaggcgcacaccaccacacccagctagctaattgttgtattttttgtaggaacagggtttcatcatgttgcccagactggtctcaaactcctgagttcaagcaatctgcctaccttggcctcccaaagtgctgggattacaggtgtgagccgccgtgcccagccaggatttcttttcttttctttaagaatgctaaaaacagtcccccaatctcttctgacttgtaaagtttctgctgagaagtctgctgttagcatgatgagttatatgaccctttctctagctgtctttaagattctttcttttgtattgaccttggaaagtctgacggctatgtgctctggggatgatcatcttgtacagcaggaagagtcattctcaccctcgatcttagcaaccttagcatatgatttttattcccttgcttaaattaataacttttaccttttcgctttaagaaagcactttacagcttctctggcatatctgaattgctagcatcattacacttgtgctttggggccattagtaagataaaggttacttgaaaacaagcactgagatacagtgacagtccgtgacaactgagatggctactaagtgactaatgggtggggagaatttaagcatgaatatgccgcacaaagcaagaattcacatcatggatgctactcagaatagtgtgtaatttaaaacttatgaattgtttatttctggaattttccatttaatatttttagactacagctgaccatgcgtaattgaatgtggaaaggaaaattgcagatatggggggactactgtattaaaaaactaggacagaaaattctgtggcctgaaagacttgatccttcaggaaaatctgaacatctttgctttgtagttcaaatgtcagtaggttaagcatactgcccttgaatgtaattgtttctcaaatcttacaagagctcagagatgcaaagaaaggagccaagtgtcatgttaaacagtgttttgagtaagaaaacaattctattcacttttttttttttttttttttttgagatggagtcttgctctgttgcccaggctggaatgcagtggcgcaatctcggctcactgtaagctctgcctcccgggttcacgccattctcctgcctcagcctcccgagtagctgggactacaggcacccgccaccacgcccagctaattttttgtatttttagtagagacggggtttcaccatgttagccaggatggtctcaatctcctgacctcatgatctgcctgcctgggcctcccaaagtgctgggattacaggcgtgagccaccgcgcctggccttctattcacatttaagggagtttttaaggctaggcacagtggctcacacctgtaatcccagcactttgggaggccaaggtgggtggatcactagagacgagcctggccaaaatggtgaaaccccgtctttactaaaaatacaaaaaaaattagctggacgtggtggtgcacgcctgtagtccgggtactcgggaggctgaggcaggtgaatcacacttgaccccagtagatggaggttgcagtgagccgagattgtgccactgcactccagcctgggtgacagaataagactctatctcaatcaatcaatcaatcaatcaatcaataaaggagttttcaaattagagtaaggaataagtaatgaattatattcacatttgctagcagatcatagtcctgtcagtttataaaagctactgtctcagcctcccaagtagctggaaccacaggtacacaccaccacgcccagctagttttattttttgtagagatggggtctcactacattgcccaagatggtctcaaactcctgggctcaagctatcctcctgccttggcctcccaaagtgctgggattataggtgtaagccactgtgcccagccagccgactacattttatgacttataagctgaatcctcacagcagtcttggcaagacaggattgtcacccccactttggatgggaaaaccaagtctcagaggagaaaataatttgccaaaggtgacacagctggcttggtgcctgagtccatgctatttctagtccatgctatctgcctcatctccattttaaatacaagctactagacgcttcttaaacacatctgaacgcagtacagttccaacagatgcccactaatcttgtcattttcaaacattctagcagtccagatgcctccttgaataagcagactccttgaggatagggcttgtgtccttgtctcaggatgtgccctggtcccagtaagacagacacggccatctcttagcaagagtgtcagtccctgccatgtccacaatggcagtctgggcccttttaccgcagtaagcaagcacaggggtgccacgcctcctcagaaaaagcctttgcaatgaggattctcacctcctcactcactgagcttgccctgcccctgctgcaagctgccaccagggcggcactctgcacaggttatgaatgacgtgcccattgtgtgtctgcccaagctgctcctaccaaacctttccctgcctcctgatcaagttccagaagcagcttccagctcctccacttacactggtggcccagctctgttttctcccttccatgtctaccccataagcactgccttgccctggctccctctcaccatctaccaacacagctgcacagtgtacagagcacatctgtgtggattccgtgacactgtcatggaaaacacctgcatattcacccccaaggtatgagaaataatgatgggccataaggatctaggtctttgctttgggattctctccctccagagtctatttagccccagggcacatggcagctctcacccctatcgtcttcctaactaaagtggtttaagaggagtgacctcctgcaacagaagatgaaaggccactttaccttttttagctcgaagcacccgccctagcctttgggcttcctgacgcctggagccaccatgggatgagatctgaatgaggacatttgcttccggcagatcaaacgaagtgtcacctacctacagaaacaagttggaaggtttttatatatgaggaaaaaaaaaaagtcaactgatccagaatttaaataagttctgtagataattttgaaacataatcactcttttctcctctttataccagggtctatctgatgcaggcagagagaggtgaagcaataaacctcagaaaggcatctctgggtctccaggaccttgtgtgagttctgctaagagtcatcctgaagaattaataccaggcatcagtgacattcagtgctgggtgccaggagcccagagatgagagggcccttgaacagagactgactttgagtcattcatttttttggctacagaaatatgtctccacaaaaccatccatactcttacctgttggccactgacaccagcagcacacgtgggatgtgacctgggaggaacaactgccccatatggaattctgactgtaggtggattcctcagctctggggctccaaacatcgaggttcccagccacagacatgaaggtttggtgcttataagcgcccagccacaatcacataaaatctcatttcttttttttttttttttttttttttttttgagacggagtctcgctcttgttgcctaggctggagtgcaacggcacaatctcagctccactgcaacctccacctcccgggttcaagtgactgaaccctgctgcctcagcctcctgagtagttgggattacaggcgtctgccaccacacccagctaatttttgtatttttagtagagacagggtttctccatgttggccaggctggtctcgaactcctgacctccggtgatccacccgcctcagcctcccaaagtgctgggattacagatgtgagccaccgcgcccggttgtaaaatctcatttcttttgggctttgggtctgtcttaatctgaatgactattctaaactgtggggctacagcttctgattgcagagtaaaccatccctgagctgggcctgcggaagtctgtgctgacatccaccacccatcatcaagggacaccaggaaccaggacaaaggctgccgcgacacacaggatctccaacttgtaaagagaacttcatctaaatgcctacttttgccagagtaggaaatgaactttttttccttttataaataaggaaatacaacttaaaacttctacatccccaaaagaactggaaaaacctcaaatagcctttatagattatccatgatgcatgcaaatcctcagtctgctccttccactaaccccaggcagtgccccctatccctggacatgtcggaaatgaaaacatgcaggagaagttccttcagcagacatgaattcactgtccaggaatcatagtgtaccccccaggtccccagagtgctaggggcctcacctccaccccatatgccacacaaaccttggatatgaagatggtgttaattttggggttgtgcttgaaattctggagaatttgcatcctttccccctgagacgtaggtccgtagatatagggtctagagaagaatgaagctgtgttagaccacagaataatgcctcagttatcttgaaaacacatcagagggaaaaaggagctcaggctagctcttctcaagtagaaagccctcgtcatgtaggaatatcgttacacccaaaaaaatgactggctacagatgcacctcccagccttccccactgattctaggtttaggcccaccattctcttcgggattccctcctttccatttttcgttttctttttggactatgctttttcctgcttcaacatctcttactctcagcacagagtctatacaaggagcatctccacatttcatgaagcccaaagagaggtgcaaagaaaccactgctatttccaaaaaaaggctggaagcaactgtttgccaagacacaggcatgctccaagagatgagcagaaaggagaaaagtgcccttcagccattattgtgctgatttcccataacactaagttttaaaaacttctctttaatttctagctccctgccaggcgcggtggttcacgcctgtaatcccagcactttgggatgccgaggcgggtggatcacctgaggttgggaattcacgaccagcctgaccaacatgaagaaaccccgtctctaccaaaaatacaaaattagccgagtgtggtggcgcatgtgtgtaatcccagctactcgggaggctgaggcaggagaatcacttgaaccggggaggcagaggttgtggtgagccgagatcgcgccattgcactccaccctgggaaacaagagtgaaactctgtctcaaaaaaaaaaaaaaaaaaaaaaaaaaattttccagctccctgccaaagggtacaaccctatcaatgaactcaatggttatcatcccatagcattgggaatgtcacactccttccctctgtcttggaatgtgacggtggacagtttttgtagcttcccaagaatcataacaacagtgatgatgatgatgacaacagcaaagacaatgaagacaaactacaggtacgcaggacctaccaacaccaggcattgagctgagtattacattaaaaaaaaaaaaatccagccaggcgcggtggctcacacctgtaatcccagcactttgggaggcggaggtgggtggatcacctgaggccaggagttcgagaccagcctggccaacatggtgagaccccatctctactaaaaataaaaaaaattagctgggtatggtggtgggcacctataatcccagctactcaggaggctgaagcaggagaatcacttgaacctgggaggcagaggttgcagtgagccaagatcacaccacttcactccagcctgggcaacagagtgagactccgtctcagaaaaaaaaaaaaaagaaaaagaaaagaaaaaaatccagccagccctgccaagattcctcagcattgtaaaagacaggtttcatgttccccaatttacatgtgggaaaccaagggtcagaagcctgagcaggtggaacctgggagtggctgctccactgccgaggcccgttagcacccagagcagtgcccattaatggatgtacctcaaagagcaaaccccttgcctgtggggaagctggatagggcctgggcagctgcacacccaggctgatggcctctgattagcccagtcacaagctgccttgccgtgatccagaatgtcccggccaccacataattttatcattttctatgcatgtcatgcagtgaaaaaggttagaagccccactcgtcagaacagcctgactcttgagacccaggtttttaggtggttttctcctcccccatcaccaggaaaaactacttgcacagtggggagccctcagtttctaaaggttcccccacacagatgaaatagaaggaaaagcaccctccaagtggagaatgtcacatttactaaatacttacaagctgccaggcacaagaatccaccccccaccatcaagggacaccaggacccagtacacattgggtggcagtagctccatgtgaccgaagtacaaaaggagttcagaggtaaacaactttcccacatccagtctgtctgatcccaaaaacgatgctctgcccacagccccacactgccatataaccctaagcctctcttgcaaagtgctttggtgataccaatgcctttcttatgaaggctgggaggagccaaaagcttggagaatccccaccacacacgagcaaagaatggagcaatgcccgagagccacaggatcactttttttttaaaggatggggtctcactatattgcccaagctggacttgaactcctgggctcaagtgatctttctgccttggccccccaaagtgctgggattataggcatgagccactgcgcctggcccgcaggatcattttagaagcgagaaaaccaagaagaaaaaacactacttcatacatttaaaggccagagacacaaaaaaaaggtaaaaagtacacattgtaatgatcattctagtacacaggagacagccacaatctgctgcccttcactgtgacagactggcttggaattgacagtgccaggcaaattaacgtccctgcccaagcagatgctcgggaggctgcggctaaggcacaagcctcaggagtgctgcaaatgtaggtgggggaggcccctggagtgaggctccagaagactggaggagcattgctgtgggaggaaggatggggagagaatagttcttaaataaggcaaagtaaatataggaactgtctcattgccctgctcaaattggcactaatgtgacagaacacaaacccaccaagaaaacaggagaagaaataacagcagatgagagaagtgggtaacatttcagaagctgaaaagcagacagatgcaggcacagtacctgagctaacagactagagaaagcagaagctggagccggcaggagggaagaccgatacaaaacccgccgcctctgtgtcctctgcagcacgcaggagggctcaggaactagtcaccagttgcctgagaaggtggggaggtgcacaggaggactggcagtgtgtgagtgtgaggagcagttgggtccggccggcagcaggcaggccacctccactggtggggcactggaggcttattctccagggatgcccggcagagatgagggaaaaggcaagactgaatgcaaagattccacaagccctcctcttcccctaacacacggtggtgcccaggggactgaaaaattcctcactgaagaaaccgtccagcccaagagaaaagtcctagagatactggcatttggcaacctcctgaagaaatagccaggccctgcccagccactctggtgaggtccacaagctggcaaacccactaagccacacagaaaggcctgccaggttttcagtgactttaaaccaataaaatacagtcaaggattaccaaaactcagaaagactcaaaagacaggtaaaaacaattaagacaaaaaaatgaagaaaagagacatggcaggaaacagacggaagcttcaaaagttttcaaagcctccgagaagacactctattcacaaacaaaacaagaacagttaccaggaaagaactctcagaaattaacaagtctcaatacaagggttagaagacaaagagataaaaaagtagaaaaaagataagcaaactggagaagctgttcagaggatctaacatctgatgaatcaaaattccaagaagggactacatagagaaagtgattaacaacaaaaaaacagaaattctcagaactgaaggacacgagtttccagatggaaaggatatactgagtgcccatcacgatgaaagaaaaacattaagaatatcactttcaaatttccaaaaagagagaagatcctaccagttttcaagggaaggaaaacgcacagccaccacagcagacaacacactgagaggaagcaaagggcatcagactgccaaactgctgcactggaagctccaatgttagttctaggacctggccaaactactgatcaagtataaagtcgagtaaagacatctgtaaacatgtgaagtctccaaagcttctcctcctacatcccttctctcaggaacctactggaacatgtgctccatcaaaatgagtaaccaagagggtggagatttcagggtgggaaacacaacaaagaggcccagggaagtcatggggtagtgtccaagggaaaccccatggtaacagctggtggtgtctctagtcctagacagcaagcaggccagaacagagtaagcgaatggagtgctggtggggatcccactggggaaacagaaaaacagaactgagaaattacctgaccctactgagtttatggttatgtgaagactttggaggggaataattattcaatgcacagaaaaccaagcaaaaacaatgacaaggcaattattaactccaaggcaaaaaaacatttacaaaaaagaaaatgtaaggccgggcatggtggctcacacctgtaatcccagcactttggaaggccgaggcaggcagatcacgaggtcaagagatcgagaccatcctggccaatatggtgaaaccctatctctaccaaaaatacaaaaattatccaggctgtggtggcgggtgcctgtagtcccagctactcaggaggctgaggcaggagaatcacttgaacccacaaggcagaggttgcagtgagctgagatagcgccactgcactccagcctggcaacagagcaagactccgtctcaaaaaaaaaaggaaaatgtaatagtactctacagctctgcctgaacatacttacacagtcaaaataatgtaactgaatattaaagtaacccccaacttgtgctattcccatattgggagaatggtaggagagaaaacaggagtggggagagtggtgtatgtaagaaagctaaaccctcaactcctacagtaggaagttaataggcaatttctataactgatcatcaagaaattactacataagctattgcttagaaagatgaaggctggccaggtgtggtggctcatgactctaatcccagcactttgggaggccaaggcaggaggaactgcttgagctcaggagtttgagaccagcctgggcaacatagcaaaaccccatctctacaaaaaacaaaaattagctgggtgtggtggtgcgtgcctgtagacccagctactcgggaggctgaggtggaaggattgattgagcccagggggtcaaggctgccgtgagccgtgattacaccactgcactacagactgggtgacacagtgacaccctaactccaaaaaaaaaaaaagaaaaaaggaagaaagaaagaaatatgaaggtaaacaacaaaaaagagtcaaaagcggctgtcttcaaggaatagaattgtgggtgggaaaatagaagcagggaattgctgtttttcacaataatctaaatgttgacttggattaaaaagtctttctaaattaaataaaggtataattttagaaacttaagaaatttaatctttctatgagtttgtcttcccttctataaaatgggaacaacattttatatggctgaagtgaggattaagtaaaacctatgtatagtacccatagcacatagcttgacctgtctccatagagggcctggccttctgcaacacttacagcacctgaagtcctgtgtcactgtaggagcaagcgcagacctcttcctccttacttggcagagctttacaaaagccaggttttaagcacaaatatttgggtggagccatgggttgatgaggatactgcgtgggcatttctaagctccttccagatgccagtccgtacttgggatgccagcccagcccatcttgccttcccagcccctaggccatccagtctggcctcctctccacccacagagctcacacagcccaaagctccaaatgccaactcccacccacctttggagcccagatcttccatggggccccacccagctcagtccaagtctctgctccctgttctttgggctcaaggtgactagccccccttttctctatgctctaacctctgactccaaccacctacttcaggtcttccctggtttctgagaccagggccacagaacaagatctttggagcccaagaagttcctgagagaaaaacaaaaaaacaaaacaacagccaccttctgcactctcaatggggaagagaaactggcctggaggaagctccaagttttcaattcttacttgttcagtcgaatggcatattcctttagggcaaacacattgtcagcaaagacaataatcttgtcattcctcctttcatgaaacttgatcagaaactggcaagctctaaatttgttggggttcatggtgtacagcaagattcgtttcttggttttgattgccacatattcccggtaaaattcaggagacatagggcaccagacctgtaatacagtaagaaccaggggtcattttacaagtttaaacaccacacaatttaaaacttttgaagacctttctctagcagaattagctttaaaacaaaaccagtcaggtgcagtggctcatgcctgtaatgccagcagtttgggaggctgaggcaggcagatcacttgaggccaggagttcaagaccagcctggccaacacagtgaaacccagtctctactaaaaatacaaaaattagctgggtgtggtagtgcatgtctgtaattccagctacgcaggaggctaaggcaggagaatcacttgcccaggaggcggaggttgcagtgagccaagatcacgccactgcactccagcctgggtgacagagtgagaccctgttttaaaaaaaaaaaaatgctatgtgaattagaaatcagtacaactgaaaataaatgcatgcacaaaactaaacccaacctaatacctcctattgaactggacgttttcacatgttaaccacttaaaagatttttaaatgcaatcacatccagggagttattttcacaccagctgcaagtgtgcgaaaccagattctcaattggtagtgtcagcaattcttccatttaagccacacttccacacacgagtcagcactgctactgagtaccgccacctcttcacacacttcccagcagggctgggagcatatcagttaggcgcttggggctatcagagcaaagccctttgctgccaggctcccaggcagcactgtggtatcaggggccttcattcatccctgtgccctgaatgctaatcctcacccacagaaatccatgactggtaaaccccatggctaggaaaaagaatcatcacaaattcaggggtatgtgagatatgtgacaagacagaagatatgcagcaagtgggtctagtaccacccaaccacagggtgactgaggatcctgtatgaagtggtagcaggtgagcctaagtcctgacctgtgtctgcccatgaggaatcgatctgatcactcccctgcccataggaggaggccctttcccagacgcccccagcccaggcccagctacctcagcacactggactttggcgatgtagccattattctgcagctccatccagttggcttcgtagagcttaggcccaatcagaaaatttaaatccacaattttgtcatcttcgcggacgagggtcgcagtcaaacccagcttacagtgggcctgcacgatggtgagcacccttcggaacatcttggctgaggaaacaatgggagcattcacactgtcacttttctttcttattttttatttatttattttaaaatattttttgtagagatggggtctcattatattgcccaggctggtcttgaactcctggcctcaagcaatccccctgccttcgcctcccaaagtgctgggattacagacgtgacccactgcacccagcctacactgtcactttttcaaatgctcatagctgtgcaacttaacactggcttatgacaccacctgaactaacccttgggtttcaggaccacagaagctggctctagacaagaatgactaggcaaatgcttcaccatcacttttagacctgtccaaaagaaaatgaaaaggagaacaagagggtgaaatgagcttaaggaatctccaagttaatgaatcccagcattcccctcacaacagttatcagtagaagtacagatggcaatttgaaatacaacctgcaatacttactattaataccattaagctctaaattacgcaaagaattttcccctaacacttgtacccaggttactgaaaagaaagttgacaatctagggagaggaagaaatgaaagaagccagctcttctcagcttcccatcattttcccagaaaccgagaagaaagccaagcccacgggagtgatgaaactccaggaactgttcgcccaagccctccggcccgccttaggaaactcccctctccaaactttaccaattcaatcactttggtcaaccagcaacctctttttcttcctttcttttgaacattataattctctctggtttatcaaataaaataaacacataaagggtatgagttattcatttttaaaaaacctaatttatggatttccacgggctcaccttttaaaaattctaatactctgaagcaaggttaaaatgtttgagtcatgcttatcttacaatataattgaaagtagggctaatgatatttcagaaataaatagacacaaaaatctaaggaaaaagaggcctgaatgcaccaaaacacaaagacgttcacagtgaaataacatagggttgcctaactctaagtaaatgtttagtttttacatctacatggtttgcacacaacaccacatgcaaacacacacacacaaacacacacacacacacacaacacagaaaacaaaatcagctcagggttatgtctaaggaaagactgtgctggctccaaaatacagtagccaagaacctcagaccaagctccccatgttagagggaaatggtagtcaaggcaatggctacaccaacccagtgtgggccccagagaggcaacactgggggacatactgacccaagacaaggataaggcaggtaggactctgcctggacacccgtgaccccatcacacccctctattacactctcctacagccctgacagctgtcacaggtgaataactcacagcatactactcaatatatttttacagacatgcagctgtggaaccacctagatcaggatatagagaaccaggcacccagaggtctctcccctgaccccttctgtcaataactagcactcttccttgagggaaacactcctctgacttctgagaggggtctgcctcctttctgaactttgcatgaatgaaatcatagtatgcacttttgtgtgtggcttgtatcactcaacattatgtcatggttgtcatttggcatttatttgtgtggttacttggctgtcccttccactttgtctccagtgccaagtacagtgcctaaacttagtaggttctcaataaatacctgtagaaataatgaaactggcacagtacctagcacacaggaagcacttaatatacacaagtaccataatatgaatcattaataaaaaggcataacagagctccttttgaaaaatctgtaaaacagcacagcaatctttatcctttgagataaatctcaaagattgatcactccacctaacccaacacagcagacgttaagacagtcaggagacttactgtgacttcctagcattcccttatttaacatttgctctctgggacaatgagcatggccaggccactgggcttatggggcctgtactcaaaaatcccttagagtttgttggtttcactccgcaactcaaccaaagactaactcatccagtgaactagacgagagacagacaaactcacagacatatgtgagtgtgagatgcacctttttgtacttgttcatcagataaccaatcccaaatctgtgctgttgtcccctggaacctgggacctggggcttgggttaaagaaaaacatgaacgtgtaccaaacatatagtcagacagaatgcctcaagccctgaacacagcttccaaccaaactgctacagaacaattccagactcctttgtgggtagtgattctctgtaccatcaattttcaatcctagcagacccaatacccacccttccaccttttttcttttgagtttttaaattctcacagtaaaactgacttggggcggggggtggggggggcacttctatgcattttaacatatttacatttttgtaaccagcaccacaatcagggtacagataaagacagcatcccccaaaattcccctgtgctctcctttagagtcatccatctctgaccccccacttctggcaaccactgatctgctggccagcactatactgtcgttgtataaatgaaatcacatactatggaagcttttgaggctgacttctttcactcagcaccatgcttttgagattcatccaggttgcaacatgcagcaagtttgttctttttcactactgagtagtgttccagtgtatggatgtaccacagcttgtttatccagacacccactgatgagcacctgggttttggatattatgaacagagctgccataaacattcgtgtacaggattttgtgtaaacctcttttcatgtatccaggatacacaggaatgggactgatgggtcatgtggtaatttcataataaatggacaaactgttttccacagtgaccatacactttgcaatccatccctccaggaatgtgtgacagttcagttgctgtgacctcatcagcacccgcacatcagtattttttattttggcccttctaactggcatatgggagcatcctgtggtgggtttaaatctgcagttccctgatgactaatgaggttgaaccctttttcaagtgcttttttgacatatgtatatccttttttggtgaaatgtctatcaatttctttggcctatttcttaacctttttgccatggcctgaatgcctaacaggaaactcaaattcacacatctaaagcccaactcctgatagtcaccttccagaccagctcctttgagagtgttccccatctcaattaatgcccactgtatcctccctttgttcaagccaaaaaccttagtgtcattcttgatttctctctgattccacacctgacctgtcaattaaagcttcacaacatatccagagtcggatcacgccttcatccttactgggattccacaaactcacctcaccgcttctgtcttgcttccttcagtctatttccagcacagcagccagggcagtatttttacagtgtaaagtcaactcatgtcatgctctgctcaaatccctcagatggcttcacactaagagtacaagccaaagttcttgtcgtggcctacaaggtcctacaagacctgccccaataccgctaatcttcctcagccttgactactgttcctatgctctcctctggccgcatggccaccttgtgctgtctcactatgccaagtactttcccacagcagggcccacaccctgggcttccatcagaaagacctccaatccctccctggccagctgtgaacatctctaggtatctccagaaacccatcagggctgaagagctctcatgcacagaaagaaccagatgctggggccattttgacattttgaacactacctgtgaaaatgcctcagatttcattttgttcatagtaacctctattagactccttaatttaccctaatctgttcatctttattttttttttttgagacagagtctcacactctgtcacccatgctggagtacagttgcacaatcatggttcactgcagcctcaacctcccaggttcaagtgatcctcccacctcagcctcctcagcagctgagaccacaggtgcacaccaccacacttggctaattaaaaaaatttttttttgtagagacatgtctcactatgttacccaggctaatcttaagctcctgggctcaagcaatcctcctgccctggcctcccaaagtgctaggagactacaggtgtcagccaccatgcccactcctaatttgttaatcttaatcccttaatctgtttttatcaaaaaagattcgcccaaaaaactatacagcaataaaaggaacaaactactgataaatgctaaggcacagatgaatcattatgggaagtgaaagaagccagacataatatatattgtatgattgtgtttatataaattttccataaaaagcaaatctatagtgacagcagttcagtagtcatctgaagctagatagagaaacaaagattgactgcaaatgagtacaaaggaaatctaaaactggatcatggtggccgaatgcagtggctcacgtctataatcccagtactttgggaggcccaagcaggcagatcacttaaagtctggacttcaagaccagcctggctaacatggcgaaaccctttctctactaaaaatacaaaaatttggccaggtgtggtactttacgcctgtaatcccagggtgaggctgaggtgggcggatcacctgaagtcaggagtttgagaccagcctgaccaacacggagaaaccctgtctctactaaaaatataaaattagctgggcatggtggcgcacacctgtaatcctagctactcgggaggctgaggcaggagaatcacttgaacccgggaggcagagcttccagtgagctgagattgcaccactgcactccagcctgggcaacaagagcgaaactgtctcaaataaaaaaaaattagccgggtgtggtagtacacacctgtagtcccagctacttgggaggctgaggcaggggaatcagttgaaccctagaggcggaggttgcagtgggccaagatcacacgactgcactccagcctgggcaacaaagcaagatgccatctcaaaaaaaaaaagaaaagaaaacttggatcatggtcatggttgcactggtccacaaatttactaaaactcattggattatatatttacaaggggtgattttatggtatataaattaaatcaatagagcagcttaaaaaaaaaaggtttgcccatgatacttggagaagtagggcttctattacatattgactaaggatcaatattccgggcttcaaataaaacacatcaccaccattttgggaagggcttttcagtgctcctaacccagtttttagagggccattaaaaaacggatgaagctgagcagcaaaaggaagatggaggaaagaaaatatcattttctaaatcactactgagccagtgattaagcaaactgtgaatgtgaacactcctgcctgcatcccacttaagaattactggccgggcacggtggctcacgcctgtaatcccagcactttgggaggatgaggtgggtggatcacgaggtcaggagttcaagaccagcctggccaagatggggaaaccctgtctctacaaaaatacaaaaattagcctagcatggtggcaggtgcctgtaatcccagctactcagaggctgaggcagagaactgcttgaacctgggaggtggaagttgtggtgagctgagatcgtgccactgcactccagcttgggtgacagagtgagactccctctcaaaaaaaaaaaaaagaactattaaaagctttacccagcaagccagcaagtctttctagccagttgggtgggctacacagcagtccctttcccaacctaacaactggaaattggtttgtctgttcagcaagtggacagctcagctccagcctgcttacctggtatggtgtgcacttcatccaggatcatgaggccccactcctgggtcttgagccactccatgactcgctcggcctcccaggaccttttggtggtgtggcccagcatggagtaggtgctaatggcaacggagcagccgatgggcttgtccttggcatcggaggtgaaccggcagatctggctgtcgtcaatggtggaccacatcttgaactgggctttccactgctccacagaaacagctgagttgcccagcaccagacagcgttttctgacagtgcatgcagcagtcacaccaaccagggactttccagcacctacaagaaacaagagtgcaatcccacccaaggacaggttgaaatgaaggacagggacaggcagaatgactcacaagtacagcaatctaggaaaatgtcttgtaacagtccacatagctgacatctgagcgacacacactgctccagcctgttttcttctttataatgaggagacatgcccacttcacatacatatgtgagaaatggcaggcgctggggcctactgtagcactttacacacatctcatttaaatgtcaaaatctcaaaacaaaccagtgagaagagaaatgcctgttattgttattttaaagatagaaaaacctggctgagccaccatgccacggtggctcatacctgtaatcccagcactttgggaggccgaggtgggtagatcacatgaggtcaggagttcaagaccagcctggccaacatggtgaaaccctatctttactaaaaatacaaaaaattagccgggcatggtggcgggcgcctataatcccggtcacttgggaggctgaggcaggagaatatcttgaacccagtaggcggaggttgtggtgagccaagatggcgccactacactccagcatgggcaacggagcaagactctgtctcaaaaagaaaaaagaaagattgaaaaactaaagctgaggagtactttaccttgcccacagccacgggacagtgaagctactgggtcccagcatgcctggcccacagaaggaggcactcggcaaaagaccactattattattacacagcaaacggggctgagaattcagggatgcgctatgtgtgtacagagaaaatgaaattccaggagcttctgagtttactaccatccaccatttgaagatcaagagaaaaatcaagcttttccattaaacagagatccttcctttattataaaaatacactgtgagttaccaggaataaacgtaaataaaaaaaatttgtaaagtgaaataaaaaaggaaaacaacatcaaaataacccttggagttttggaaaaaaagaacctccccttccctgaagaccttgcctctgtaagtcctcagtggggtcccaaggtgagtctgctgtggtctctggccaagaagctaggctaggacctgacactactgggataagtggtcaaacaggtgcccagggggccactcctgcctttccctggacctgcacaccatcctagtcatccaggaacaccaaagtttctgcgctagggagtctccaaatacacaacccctaaggctgattcaagaacaagaacctaaccccactaagtgcaacagccccttgccatcattacaatctcacccctcatgtgctctaatttttcttcgctgactctagcaccacccaaggttgtacacatctgcttaccatctgtctcttccccagaagagtgagctccatgaggtcagaagtgttgttctagccaccataatacccccagtgtccaggccagggcccatacacagcaagcactcaaatatttgtcaagtcatgaatcagggagtcacctgatcttggcttttcagcaaggtgtgatttagggaaatgtgcagagagaaagcgggaggcagctggcagatccagacacaacagcctgaccaccttcttaactctggtaccacttaccgcagggaagaacaatgacccccgaacgtgcacgcccgtttccaaacatctttcgcaagctcttctcctgatagggtctgaggacagctgtgggctttaggtcaatgttgatatcagggttgacagaatcattccggaagtcatattctgccaacagagggtactccaggtggatgcaacgtttctggagttcctcaatcatttcctggaaagagggcacaaaaggggttttaaaatcttgttactgtgctcaaaaacattacatcttctaagaggtccaatggtcaaaaaagtggcattctatctaaacttctacaagattttagatcttgctcagtcaacaaccgggataaagcacagaaaagcaacccagactaacaacactttgaaaatgaaatctaatcagcaggcaaaattgaccttcaggcaccatttctcacatctcctcaggaacctgtgaagaccagcctaccagcctgaaaaagaggacactgggactttaactccatcaggagaaatgatgccatggctcacagataataaaaaggagaaagcaattcagggaccaacagggactccttcctttcacacagactacaggcagagtcgacacatggctggactagcttctaacagcagctcagtgaaggaaccaggaggaaggtacattcactaacctgcttgacttcaaaagacactgtctgtgtctcttcttcttcttcttcatccttgtccatttgctcatagaagtcaaacaggtccatggggatgtcagatttaccctgtggatctgtcactcgggaagtggagggcccaccactgctttcagcagtcttagaaatctgtgagagaggtaggtgctgaacgtgcacacaacatttaattctgctgttatcaagcaatgggtgaagttgtaaagggtagaaccagcagggctgctaggttgtaagtgctgggttaaagacacctgagagaactgaaatcctaaatgcctgcccccacccaagggtggcccaggagtccacatacggcagatttgcttgtgaaagtctctgtgatgagctcagtggcctccccttcagagtttcttaagcggcattctcggatcacggggtcctggagaagatgctggattacatcagggtggcaactttcaacgaagtatctgcaagcaggggaggaagaaggggtctactgaccagcaggtacctcctggagattccactgctcattcaattagatggtctggaaatacaagcctcatgactctccccacaacccttcgccaaatctgtaccatgagctgccggccatgatttaacatatgagggttgtgactttgaggtcaagtaggcaggggcctgagcccagctccactgctagaggaaatacagtggccagtggatgagtttccagtctgggccacatctcttgtttctcttctcttatctgtgcttcacagaaaagacagcataaacatcaggtccttcccatatccctttattcctgctggtgcgcagaaagtgacagtgccttgggacaggcctgtcatggaatctcttacctgttgtgcttcaagaccagcttgacttttccatagctgacagtacacaactgcaaatacagataacatccaacaggtaaatgtgcagctaactcagaacacattcattactggtcacatcttacacctaccaaccaagtgaaaagttcattttactttagggaaacccaacttgcaatcctaaagtggtcagatgtgcctaaactgagctttttccattggcctctgctttctgagaacaaaatcttcctcttgcctgggtaattctgatgcatatccattaagttataaaacgctgcttaaaatcttgcattctgcctttcctctctattcccacagcccccaccctagtctagagaagaccacaccagtattactacaactccacagagtatgtgcacagtaattgcggcttaaataaaatgcaaagcctcttcaccaatgctcctatttccccaaatagaatgtaagcatcttgatggcagagaatacagcttaaatcctcccaggttcccaaccacctttaggaaggaatacagtagaggctgtgtggcaacaataaaaatttgccactcaggccaggcacggtggctcacacctgtaatcctagcactttgggaggccgagccaggtggatcacctgaggtcaggagttcgagaccagcctggccaacatggtgaaaccccatctctactaaaaatataaaaattagccgggcatggtgacgggcgcctataatcccagctacttgggaggctgaggcaggagaactgcttgagcctgggaggtagaggttgcagtgagccaagatcatgccactgctatccagcctgggcgacagagcaagactccgtctcaaaaaaaaagaaaaaaaaaatttgccagtcagactttgaggggctgcctatccccgctgttgtccctgatccaccactacagtgcaccaacacctacatccctgcaggcaattcgcagccaagaccaggcagagccacagtgttggtacaaggtcctctccttgggcacgctttcttttttgttgttgttctgaggcggagtctcactctgttgcccaggctggagtgcaatgaatggtgagatctcagctcacttcaacctctgccgcccgggttcaagtgattgtcctgcctcagcctcctgagtagctgggattacaggcacccaccaccatgcctggcgaatttttgtatttttagtagagacaggaatttcgccatgttggccaggctggtcttgaactcctgaccccaggtggtccacccacctcagccacccaaagtgctgggattacaggagtgagccactgcacctggccgggcacgctttcacatcacaggaaaagagagttctctccaggactcctgcagcttctctgggactggctgcagtaccatactgaattcctgtggcactcttctgccactccagatcccaaggtctgaatctgactccttttggatcagccaaaggcaatgaaagccactgtccatctcttttaaatggcattcacccatctcgcagaagaaacctagcatgttcaactattaatcacatggaaccctctttgttttgtcaaaaacatctgaagttgtttttgactttccctcatggaacttgttgactattggtctcctgcagatacttagctttagacagagtttaccacctgtgttagtcagcttgggctgccataataaaattccagactgggtggcttcaacattagaactgtattttctcagagctgtggaggctgaaagtctatgatcaaggtatcagccgattcagtttctggtgaaggctcttgtctatggaccaccttcccattgtgtactcacatgacaagaagggcaggtgagagaaagcatgctccggtgtctcttcttaggaggacactaatcatagcggatcacgacctcatttagtcttaactactttcttactccaaatacattaccattggatattaggttttgaagacaaaatttgaggggaacacacacaattcagtccccagcacactcactttgggctgcatttccaaattctccctggctacaatgggcctgaattagtagcccctctgtgttaatacccacagctgggagcggctcatgagaagcgtggcctcacccagaacacaatgctggatccagagtgtagcggctcatgagaagcatggcctcacccagaacacaatgctggatccagagtgtagcggctggggtaatcagtcgttatgctccccacaggaaatctgaatggcacattctcatggctgccacaggctgacaacatggagcacctatgcctattgttacattagcagggcaggtggaattgctggtctcagctgtcacttgccttaataaactgcataattccatcagggactccagtcttgctgagcttcctgaggtactcggtgatgtcactggtttgcagcccaacgctgacagctgcatacaaggagtaggcagttagtttgtactcatgcacatgggttggtcggcacactggctctgcaatagccaccaagaagtcttgggcatatttgtaaactggagagaaggcttccaagaagatatggccatcgggagcctgagagataccaaatggacaaaacagacaaggaaacatgagttgcagagactactgggctcttgcccatatcattatcaagaaagaataagctgcccaacaccacagatattcttgcaagcactccttcagacaactgtggggcctgttacattaatcagatacagaagagtaaagaaaaatagaagaaagtgtttccaaagtcaacagctgtttcctactattctgcacagagaaagcccatcttactggctatcctcaagttaccttttggctagatttcaactaaatgtataacattaattatttaaagtagagcaaaagcttgctaccgaacatgtcttccattatttgaggaaacaaactgttacatgataaatgctatttattcggcagataaaaggattcactacatggggtagggctggggaaggagtgagagtaaaccgaggggttagagctgttggaagcccaggtccggccgccacacgtgtgcgcaactgctcgctgttgccttgggctgttccaacgtgtgtggatgaaaattctctcccggccagttctaggggcagtatcctgaatgtcagttttgactctgaggatgcccaagatttagctgccgctccgcacactcctgggccctgcccaagctaagggcatgcttaccacccagaggggcctggaggtgtggtcgtccttcagcggcatttgcagcctgtagtccttggctccatattcatccactttggtgcctgactcatccacctgcttccccgccgccgagggaaccgcttcctgagggtcgttccccggggcgtcctcttcatcatcctcttcatcctcatagtgccgcttcctggatttcttcttgtctgcaagataccaacacagaagtaagcccagcaggagccttcagggttccctccgcaccgcttggcagcatttcacctgcgccgccgcaaactcctagctaagagccacctgcatcccgcaggcgttgcgcccctcacccgtctcccctaggccgagttcgctgggctgcgcccaggtccagcatctctcccgcccaaaggcctgtcccaacggggtgcgcgcgggagggccagcagggtcggccggcgcagaggcccggagcagctccgaggcagagcggggggcagggccggcaagggcagtcgtggctgagcgtgcccgcgcaacgtctcaccgcggtccgctcggtctcttttgcccatggcagctacagcagcagagagaagatgaccccgctcccacaggcccgccgcggcatccgctctggggggacttccggctcaatccggaagctccctgttgtccacacaggatgtcccgcctctaggcgccgtgatgtgggtggctggaagagcggagagccagcgaccgccgatctgttagctcgtgcgacccagcggcgggggtcctccactgttcatttctctacaactgaaggaaaatactgtgtgttgagcacctgtgtagtgcgcgaattaaaggcctcatccttctggaacttaaattttaatgaagccatgtgggcaataaatgtgtgtgtgagagagagagagagagaatgtgacctgagtccatgggtaaggaagaattcttttttttaattaaaaaaaatttggctgagcacggtggctcacgcctgtaattccagcactttgggaggctgaggtgggtggatcacttgaggtcaggagttcgaggccagcctggccaacatggtgaaaccccatctctgcgaaaaatacaaaaaaaagtagccaggcatggtggcacacgcctgtagtctaagctacttgggaggctgagatgggagaatctcttgaacccagaaggtaaaggctgcactgagctgagattgcaccactgcactacagcctgggcgacaggccgagagttcgtctcaaaaaaaatttttttcttttttttttttttttttttgagacggagtctcgccctgtcgcccaggctggaatgcagtggcgcgatttcagctcactgcaagctccgcctcccgggttcatgccattctcatgtctcagcctaaataaagcagattaccctcaataatgcgggtgggcctcatccaaatcagttgaaggccttaagagcaaagacaggtttctcaaggaaaaaggaattctgcctccagactgcaacacagaaagttctgactgagtttccagcctttggactcaaaactacaacatcaactcgtacctgaattcccaacttgccaacccccacaattgcatgagccaattctttaaaatcaatcaatcaatctcgcttgctcagtgggcctcttggttctgtttctctggagaacgtaacacagatttttggtacggggaatagggtactgctgtaacaaatacctaacaatggggaagtggttttcaaattgggtaatcggtagaggctgaaagaattttgaggcgcatgatagaaaagcctctattgtcttgaagagccttggtagaagtatgggcattaaaggtgattctggtgacggctcagatggaaaggagaaatatgttattgaaactggaggcaagtggtagagagcttgcctgaattgtattctgttgggtggaaagtagaacttataagtgataagcttggacattttgctgaggaaatttctacatgatggttcaaagtgaggcctgggccaggcgcggtggctcacgcctgtaatcccagcactttgggaggccgaggcaggggatcataaggtcaggagttcaataccagcctggccaatatggtgaatccccgtctctactaaaaatacaaaaattagctgggcgtggtgtcgcgcgcctgtagtctcagctgctcaggaggctgaggcaggaggatctcttgaactcaggaggcagaagttgcagtgagcagagatcacgccactgcactccagcctgggcaacagagcaagactccgtctcaaaaaaaaaaaaaaaaaaaactgaggcctgctttctccttattgcttatagtgaaatgtgagaagagatacactgaaggtggaattattcaacaaaaaggaaccagaacttgaagatttggatcattcttatactcacattgtaaaaaaaaaaaaaaaaaaaaaaaaaaaaaaaaaaaagagagagagaaagtatgctctggagaaacactaaggatgtggacaaccatttatttgcaagagattaggtgtgtggcttatagacccaatcacccatctccacagaaacctggacagttttgactagggtacatagatgggatgaaatgaaggaaggctgttggactcccaggattccacaggtaggaaagggattggcaggggcagttcagaggccagtgaggctgcttccgccaccacaggactgaaagggacaggcttgggtttgaacccacggccaccacctcctcagttctgagggtgcggggctgcaaccccagtgggccctgaggacagaggatcaagccagtgaggattattctcaagccttaaaatcctgtcattggccctgttaggtgtcagactttcttggcacctccaagtctttttccttcccatttctcccttttggaatggaatgtgtctatcctctgcctataccattgtaattggaagcagataacttgtctgttctcatgggttcatagatagaaagaaaatttgctccaacaggaaacctaacccagagtcaattgatgtggatgatttgggtgatgagatttgaactgatatttagatgatactggactttgagttgatgctagaatgactgacttttgttgatgttgagatggggtgaatgtactttgcatgtgggaaggatatgaacttgtaggggccagaggacagactatgggttgaattgtgtcccccacccctcaaaaagttattttttttgagacggggtcttgctgttgccgagactggagtgcagtggtgcgatctgggctcactgcagcctcaacctcctgggctcaagtgatcctccctcctcagcctcccaagtagctgagattacaggcatgccaccatgcctggctttttgtatttttttgtacagacggggtttcaccatgttgcccaggctggtcttgaactgctggacttaagttgtccatcgccttggccccccaagtgctgggattacaggcatgagccactgtgcctgacccaaaaagatattttgaagtcctaacccctactacctcagagtatggccttatttggaaacagggtctttatagaggtaatcaagttaaaattaggtcattagggtgggcctaatccagtaactggtctccttataaaaaggggagcacacacacttgtgtcaatagacacacaaaaagcaccacgtgctgatggaagcagagatcggatttatgctgccacaaaccaagggatgctatcagaagttggaagaggcagctggacacaacgccatggagcacatgtagtcccagctacttgggaggctgaggtgggagcccagaagtatgaggccaacctgggcaacatagtgagacccaatttctaatatataaaaataagttggaagaggcaaggaaagattcccttatgggtgtcagaaggagcatggtcctgcccacaccttgatttctgacttctagcctccgtaactgtgagacaataaattttttattataagccacctaatgtgtggtactttgttacaatagcccctattgttggacatttagagttttaagtttgggcttttatagatacaacttaaaacattcacaatctatttccacaggttaattcctaggtataaattggtgggtcagaggatatacaaggttctgaaatttaagacagggtctcgttctgtcatgaagactgcagtgcagtggtgcaatctcagctcactgcaacctctgtctcccaggctgaagcgacccacccacctcagcctcctgggtagctgggaccacaggcatgcaccaccacacgtggctgatttttgtattatttgtagaaacagggttttaccatgttgcccaggctggtctcaaactcctgagttcaagtggtccacccacctcggcctcccaaagtgctgggatcaccatgcccggccaattctgaggtttctgattctgattctgaggtttcaattctgaggttgtgttaagttgccctctataccaaagtattaaattatctccgccaggcgcagtggctcacgcctgtaatcccagcactttgggaggccgaggcggatggatcacgaggtcaggagatcaagaccatcctggctaatatggtgaaaccctgtctccactaaaaatacaaataaaattagctgggcatggtggcaggtgcctgtagtcccagctactcaggataccgaggcaggagaatggcctgaacgcgggaggcagagcttgcagtgagccgagatcatgccactgcactccagcctgggcgacagagcaagactctgtctcaaaataaataaataaataaataaataatctccagcaccatgtgagagaccattccttatactcagtaggtttgatagtagggtttgtgtttgtttttaatcattagttctgatttaggtaatcaagatgtccagccaaagatatactacaagttgggtggaacattatagacttagatactggaaagatttggtttagtttcattgtttttagatttgtctgcgcttggtttcctagagagtgctcaactcaagcaaggagggaataactgtaaataaaatgtgtccaagaatagatttggaaaaaccaatcacagtggaaataaatattagctttattaacactcaaagtgccattcatttatattcattccatagtccagaaggttacttattagagtaagcctttgcaccacaatctttcaaaaaaatgaacatgtaagaaaaagcagttttcattgtgctaattattgcaggccttcatgcacgtaaacctcaacaaaatgtgtgccaacaatatacaaatttccatataaacaaagtcattgatcactaacaaaatataaacatggtttcttttatattagatttttttttaaaaaaaagctatttaccagcaagaaaaaacaagtacctagaaattataaaactcagaaattgtatacatttttacaagcacaattttgaatgacaaacaaaatcaaaatgtgcatgaaatgttgcacgtaccacactgtatctggcttctggtaggttttcctaatcacactggttccttttaacataataagcttagtgacattcaacttcaacagtggactttattcctaacacgagtaattttacatggtaccgcatatttaaaacaaagttttctttaatactacattgtctgattggaaatttcatttccaattctttttctgccagttacttaaaacacacagtacaatataaagacacacaacgtatgtttggacatttcaaaaccaatttatagtcaattacaaagaatcacaatatgccaatatattgttttataaacccagtctgaccttgcccagtgatagaaaaactaaaagttgaaatcttttggggtggaatacaggaaatattcaaagacaacagtaggacaggccaatagcaactggagatagaaaaatcttgacatctcgagacaatttagtttctcacatttttccatagctctgagaattcaaaggccatttttagcggtgtgtttttgctactgcttaaaacctatttttcccttaatttgcatttcacggaattctcaaagagaatttaatgctttttcttgcaagagtattttaattgagctctaagtatgacttgcattcaattctgaaaatacaaatacattttgaatggctaaaaacaaaattttaaaaatacttttgatcagccagctgaaaatatattcatatagtaaataatctctcagaaagcttttatatatatttaattatcacaactaaacagtacccttataaaacaagttcataaaaatgtagaaatgaaatgaaaataagaacttactgggatatatacatgtgcctacagacagaaaaaaacatctccacacaaacatacatcccctgatacacagttaaaagcatactttcaacttagtaatggattttataatacattataaaattttctaatttctattaatgtcgaactcctgagttcttcaacaaagaaccatagataagtatagtttgtaaaagcaaaaaggtccatttaagtcagtaatagcagtgcagtaactgatggctacatcttgaaagaagttaaaacataaagacacagacagtagttcaatgcacgcattcatgatgctcatacactcatcaacaattattggtcagagtagtaaatcagtgtacaaattaaacatttccaaaaatgtgcaaaaatgtcaatcttaataggaaaaaaaccctttgtacataattataaactgcccagcattcaactgagattaaaaacatttagagagaaaccaataggttaaatatagagaatttaatggctacatttaaaaatgtacattattatgtcaaagggtaaatttacaaattgataatcatagtttgcaacaattcaaagtttattctcaaatttatccaagtttacttttatttacaatgaataaaaagaaccatgtgaaatgtaagagatgtcagacattaaaagtatttttggtattaactcttataatatttcagaattcagggtagcaaattttaaaaccaataacaatagaaaaaatgtaaaccatttactaattaagattgcattaaaacaattgttggtctttaaagaagtattcttatccttagacactgtactttcaattgaatagggtgtattgcaagaatttggcccacttcatattgcccataagcctctccagctcaaatgtttcaactagtcctctcttcttattccaggtggaaaaaattctttggaaaagtaagaatacatcaaatccattttgtagtctatctaatagagtttaaggtgtaattttgtttcttctcccctccaagtaaagctaatgctaaaatcatcactagttacatatgcttttaaaaaataaattctaaaaaaatatttaaaaagaagtgaacttaaaagtgcttttcggtatggtcatgaactttactgttctcaactgcattaagggattctcaactgcattaagggattcagaaattatttggggacaagtcctgtacatatagtagaagcagatacttccttatgttccaaaatgtctatggcacaaagcagacatcagtccagaacctacttttcctcacagctttgctgaaatgcccctcaagtcaaacataagttcataaatgttaagacactaggaagaaagttcgccatcaacctgaggcatcagacgttaatgtctgtctatgtgaatcagtggtcaagtgacattaacaagattggcacatgtacaagcttaaattcatgtctacatagttcctcaatagtggaagtaacttctggatgtctaaatgcactgatcacctgtccttttccttgaaggatataccagaatacaaattctactagtatctgctttataatttttatactattagcttacaagtggacagaagtaacagtgctaattattttggctatgtgtacagggaatataaaagctttggtttaaagtgattctgataatacagattgtgttacaaacaagaagtcatcaggcagaaggaacaatggtactgatttaatgcctttgctgttattaacaaaaataccatatgactatcaattaaaatgcacaattatgaaaaataagaattctatgagactgtatacaggcaacagataaaatctattcttttctttactgtagctatgactcctccctcatctttctgaagctcaaccttgaatgcttacaggaccactgaaaaaagaatctctaggctcccccaagagctcatttccatcaacagctctggaaggtgagtatgggaagatgggaggccctgatacttcccacacctaccatggcatcctgtccaaaccatggcagaagtcaaagccaagccaaagacaactataagtaggaatagctgcttcacagcatgcttcccctagccaaccaaaaagaggtacaagagaatttccttgtgaatacttggtaagctaaggaagcttattttgataatgtttggcagaatttcagttccaaaaagttcaggaagaactatgtaaaatcaattactttctatttaagaattatatataagattattttacatatacacaaattgaattttaatctacctttagcaaccaagagtatggcaatttacaatcaatattattatacaatcatttgtactagctacttctggaaaatgtactggtgttcctacccaaggatgactacactcactgtatgtcatcagtaggtcatacatttgagttgttcttccaaaaccagaaactgacctaattgaacactcatacctttccccttcttccttcccatccctgcctccaactctaaccacacacacacacacacacacatgcatgcaaacgcacacatacatgcacacatgcacacacttcacagaaaagtaacttttctgtgagtattacccaaaatgttagctgagaattaaggactagaatctgctatccctggatttcctactcactgtcctatctcattgccttaacatttgtaaaccatgtgaatgacttctttagggcaaaaacaagtattgtaactctaccatgaaaatcataactgaactataatatgccaagaacttggacagtgccaatgtgattgaaaatcaaatattcaacccagaaaacatttacatgtctctttagaacgagaatacctctttctatgcttgtgttgggaattcatgtctagtggaagctgcagcatgtctatcacagacaaatcctaatgtttctctcctaacatttatttatttatttatttatttttttaaaaaggaggtagaaaagggtaggaggaggcaggcattaagaaacatttaaggaccaatacacagtctaaggccaaatgaacttgtgaagcctactgattttggaaaaaatcttcattttggtgggtaacttgaattattaatataaaataaaattaaggcatacagagaaaaggcactactaaaaattaacaattggattgcttttcattaacatttaaccaatcttaaaattcaaataaatatgaacattacatttgtaaaacaaaggccaaacttagtaataaaacagtatgatctcaaggaactgtcctgatcttagtataaataacactgttgacagagttcaatttctatcaaatgttttgggtattttcacaatttagaccaaaataaagtatgttttctttaaaagagacactggggaaaaaaaaaaaaaagaacaaaaaaacactgttatggaataaatgctccccatcaccagaactgttgagtagaggctgggttttgcagtaagagggggtcctgagagagatgctatgtgacctggttggggaggggatccctctagtttggagatacttttactctaatccctgttgtcagtgacatttccgtttataacagccaatgattacctaaaattgcttttcccttaataaaaaataacattttaaaacatcattgctgaactttcagagttagcgtatgccataaaataagtaactgtttgcccatgttcctcctagattgtgacctccttaaggatgttaatttagtacctgacataataagttacaattattgaacaaacaaagaagattcattctattaaaaaagatagatttgtatatttaattgacaccaggtgattttatatcaagctatcagttcccagactccaaataaaatcactggcacagaactttgccataggccaaggagtctgcatctggcttggtcatcctgctaaactattcacatctgattttattttctaagtgatttcacatatcttataacaactccatgtcagaaatactacagagcagatctgacatatatatgagctggagtagcagagacttagtctaaagaaatagtttcatctttttaatgcagtttctttgggaataaggtaaagactctctcaagtgaaagccaatccaattcactctgaaatcaaggtttaaaattttcttttacagttcagcaaatgcattaatattttaattccttatatatgttatgtaagggtaactgtgccttttaaaac

SEQ ID NO: 405 - DNA, 48077 bp, Homo sapiens
tcagttttactcaggaaacaatgtagctagcatatgcaacggactgcatcagcattagaggatgaaaatgtaaaacacgctttcctctttcaaggcactaaggtgcttgtggagatagtcataagcagaacttttcaatacactgtgagacacagaaagacaaatactgcatgattacacttacatgaggtaactaatatagtcaaaatcacagaatcaaaaagtagaatggtggttactgggggaggaagaggggaaaatgaggagttactagtcaataggcataaagtttgagataaactggattaataagctctagagatctgctgtacaacattgtacctatagtcaaaaatactatattgtgcacttaaaattttttatagggtggatctcatataagttttcttaccacaataacgtttttgaaaaacccaagttaaaaacaaaaaaaaagattttgttcaaacaactatatatatatgtgtgtgttttatatatacatagtacaaatatatattaatatatgcattattaattaatatgcattattaaatacacaattaaaaggcattattaattgaatagtaattaatatatgcatatataatatatatgcatgcatgttatacacaactgcatatataatatatataatgagaaatgacacaatgtaaatgtgttcaaggagggttgatgagcatatcatccaatctggaggaaggagagtcaggaatggtttcctgaaagagatgactgtgatctgactctcagtagctgagtgagagttgttggggatgagtataacattcttggcagaagaaatcaaactaccaatatgcagagatgaaaaagcacattttgtatgaagagaaatattaagtaagcttatattgttgaggataaagagcacactgtaataagagcaatgtgatagaaaagagacaatttacagaggacctgcatgctagaataaaaagtaggcttgtcctaaagagaatgcagagattttgtagggttttagatagaatagagatgaagaaagtttgcatttagtagataattctgaaagtcatgtgaaatatgattcagagaagaagcaagactagaggcagatagataaatttggagtaggctaatttcattagtccaagagtaagactatgagaacctgaaccacagtcatgatagcaaaaatgaaagaaactgtaaattcaagaattatttcagaggtaaaattagctggatttagtgattgaataaaagtggtataggaaccaagtggataaaggaatcaggacaaaagccaggtttataaccttcatgattagatgaatgattatatccatagcaagaggaggaagagagagagagagacagagagagaaagaaaccaagacagagagggagagaggcgggggatgcgggggagtggtaacataaattcaatttttattacttcactttcatgaagttacatatgagtctgaacctgtgagaagagttttgggaaaagatgtggattgagaagggcaaaaagcagatgatgaaaccctaagtagtgcaaactttatttaatgggcagaagtaggagtaaaaagactacgtacaaggtcaagaatagtaatcagaaacgtagaagcataaccaggagaaagtggaatgatagaagccaagaaaaagcagttttccaagaaggagggaatagtgaatattcactgccacagaggcacctagtaaaataaaggctgaaacatacatgtgttcccaatacatgttcccaaacatatatgcatttcagattaaaaaaaatgaataataagtatagaagacaattttcagttagttgagaagttatttactccgtattatttcttgttatttatatttgtttcatctgtatctttctattgtatcgtttttaaaaattcagacttttatatactacttttgtatttcctagttcattaaggtttatatttagttgtattaatttcttcctttttctctttggctttctttgttgttctttctctagtttacagatttatttgtttagaattatttattctcatttttatattgattgatatatttgaagctaatattttactctgattactgctttagttaatatcctataaattctgatatgtgatgttttctttattgttttctagaaattctgtcattttagtttatatttattttttgaccccagagttgcttaatagaaagtttgtacatttccagggaaaatagcctttctattttgcttaagttttaaatgtgttgcactatgatcagagaatgtgacctatattaatttatttggaatttaattagattttctttatgacctaacatatatggcaagtatttatgactgttttatgtgtgcctaaaaataagtgtattctttattattagggaacagtgttgatatagatccataaggtataaagtattgattgttagaatcttctatatctttgactaatattttgttcacttgaaatcttttagataataaattttattaaattttcttcctatttcctgtcttataaagtttctgctttatgaaatttaccattacattaatttattatggatacttataactgaattgtgtctccttttgcaattaaggttttataaaaggtccttctttgattaatttattgtttatggcaggattttcactttgtcaagcccagtatccttgatattttctgttgtttaaattggttgtacttttaaataatgtactttttttaaaaagtacacttatggtacagtacacttaattaaaatttaccatcctaaccatttttaagtgtatagtttagtggcattaactacattcgcgctgttgtacaactgtaaccagcatccatctccaaaattcttttcctcttgtaagactaaagctccgaacccattaaacaacttagcatttccctctccttccaattcttggcaaccaccattctactttctgtccctataaatttgtcaatgctagctatctcatatgagtaaaataatacttttaatgcaatactatataatatagtaatattttcttattgtaactggcttatataatttaacatgatgacctcaagttgatgtcttactgtggttttgatatacatttccctaatgattagtgttgggcatcttttcatgtgtttgttggccatttatttatcttgactgaagaaatacctatttatattcttcactgtttgtttgtttgtttgtttttgagatggagtttcgctcttgtttcccaagctggagtgcaatgacacgatctcaggtcactgcaacctccacctcccaggttcaagccattccactgcctcagcctcccaagtagctggtattacaggcatgtgccaccatgcccagctaatttttgtatttttagtagtgacgaggttttgccacgttggtcaggctggtctcaaactcctgacctcaggtgatccaagtgccttggcctcccaaagtgctgggactgcaggcgtgagccaccgtgcctggcccctcactaatttttatattctgttatttgccttcttattttgagttatgagagttttttatatattctggataaaaatcacttatgaaatatatgatttttaaatattttctccgcttttgtgggtggctttctcactttgctgattctgtcctttgatctttactccatgtacttttttctaccccttcttttctttttaactattttgaagaagttagttttagttgtgccttttgcacacaacattgagctgggttttgctttggaaccaaataagaaaatgtttttctcttctaatagaagatttaagttctttataagaattttataggttttttaaatatctatagtgtgtgcagatacagctttttaaaacttttcactatatggtctgctttcgttgctcattatattgctgctattgctgctgttgcagtagtttttacatttattttgctatttaggaagaagggtatttttaggtagtttatttatgctattattttaaaataatatcctacttccacaggttttgggcaatgtctatttgttatcataaaaaataaaataaaattggcttacaacttctttctttcgtctccttctttccaactcctccatcatctaagtttattcaatgttaagatctttcttggtgtttatattggttcttttaaatatgtttagaattctactattctatttcagctttaaattttattatttgactcccacctataacctatgaaggaagaaatgaagggaaggaaggacagaaaaaagaaaagtaaaagaaagaatataaggaagataaaaccattgaaaagtccatcagtgaaagaataattaaataaattatgttacccccagcttataaaatgctattcagttattataaagtcaacctgtatatgttaacattacaattgcttattttattttgggtgaaaatataagtcctacaacaatatatacactatgatacataatatatagcccacttatatataaaaaccaatgtgtatataaatacatatttaagtgtgtatatttacatctgggaagaaacagagcaaactctttacagtgctaatctcaggaccaaggaagtagatctgaggtatttgagagaataagggaaattatatcactaatgttatttacatttgtattgtttggattgtcttacaatgtcaaagagctgctcctttattttaggaaaataataaattactttaaaattgtaattttaaaaatatcttgtcatagagtaatttacttgatgctaagtatacacattaactgaatttgtattttctcataaattgtttctaaagtacataatgacaaaatgcctgtcaaattgaaaccttgcatattgtctaaaaactagtctttcatttaaatttgagaagtgtattaggcaaactgcttctcagttttggttagactttttacgcttcccattgcctccattttttctcaaaggaatcaggctcggtttccctgaatttgggtttaatgtgtaatgttctctagcattttgatctttctttttcttgaagaaaaagacagatatcaataaattcttaacttctctttgagaaattaaagtttctctgggcagaaccaggtagcatccttctaagctttggaataccctggggcaatcaccatgttagtgattctttgatctttgacttagtgtcctatgctacaaggatggcacatcttctaagcaaagtttgctttcatattcatcagaataaaatttatctcacaaaataaaactatttaaaaagcaaaatggtaattattgtaacattattttcaacatctcacaaatctaattgaagtgataattcaatgaagctattacaatttgccaaatcacctggctagattgtgccttttcatcaagctatcttttacttctgccatcatctcactttctacatgactttttcaaactttctcccctctcctcagtccttcaacttgtctcccacgatagccctccacaggggaaataaaaaacacatgacatgaatgtgcttattcctgccacaaattcacttttcctagccaagggccatccctttacttatggcactggtcccatctcttcttattttttcaagaatcttctacaatctgttatgcaatattttctcaacatcttccacctggttcttcattctaatgtaatgtaaacatgctcaaactgttcaaatttctcccattttattaaaacaaaaatcttctttatgtatttcttttttctttctttttttttttttttttttttttgagatggaatcttgctctgtcgcccaggctggaatgcagtgactcaatctcggctcactgcaacctctgcctcctaagctcaagcaattcttctgtctcagcttcctgagtaactgggattacaggctcatactaccacgcccaatttttgtatttttagtagagacagggtttcaccatattggtcaggctggtcttgaactcctgacctcagatgacccacctgcctcagcctcccaaagtgctgggattataggcttgagccacagcgcccggcagacctcctttatttctatccctccattcactgtcacacatattggcaagctcactacattcatatttctgattttttgtaccttacatttattcctcatcctactctcgtctcaatttcctactggatgctctttctttcaaggtaatcaataataaccaaacagcatttttagtccccatctcttctgcttttcattcaaatagtttggccatttcttatcagtttcctttgttgtatcttgtcctattcccaaacactaaactttggtgcctcaaagccctgaagtaggcctacatctatcttcaccctgaaaaactcgtctattaccttagttttattaaacacctactgacttatgactccaaattatgcctagtgctctgttctgatacccaggcttatgtaactgttacagattgagctacccagggaagtcagccttgagatggaaattagcagacaagaggactttcagggagtattcttgggcttcacacctggggaagggaaacgaaggaagtcaaaagggagaagttgagttgcaatgtcatttcaaccagaggccccagtcaatactatgaggaactcagaagctgaaattactctttagaactgtcctgagtttgggtgaggagccttttctttataagtcctgttgatcaatcattagtgtaggccaacctgggaagaagctatgaccttagggaaagaggctcccttaagctgaggcaaccccttttagggaactgataagtgagagctcccagtagctggaaaagtaagtctttgtgtttctgaaggaaatctaggtggttcatcaaagcatcaaccataagaatcaagtgcttcctcaagaatcacttgaacctgggaagagaaggttacagtgagctgagacggtgccactgcactccagctctgtctgggtgacagagcgagactctgactacaaaaaaaaaaaaaaaaaaaaaaaaatcaagtgcttacttagtcttttcactttcctatctcacagatacctcaaaagcacatttccaaaattattaataaaactcttcatgctaatccccactccctcccattgcttctccttgccattcttcctatcatatttagatagccacttagtcaagccaaaacctaggagtcctcctgaactcttttctctgcctcactgtcccccacatctaatcaattatcattataatgatgtcacatcctaaatatcttatttcagcctattttgtaccatcctgctgctgccaccggtgtaagtgactaccttatctttgccagatgactgcctcgttttcctcagtgatttctctttgcccacactttttgcccttcagatcagtctctccatattacagtcagtgatgtcttttaaaaattcccagtaagcatcgcattctatttagtgacttccaaaatctttaatttgacctacaaaggccttcacaatcagggctccaacctctccaagtttcgcatactcctctctgtccttcactcctttccactcaatccatactgggtttttattagcttcttggaaatgtcatgttctttgctgtatttcatgttctttctctacatgaattcttatcatttctcccatccaatctcagcctatatgtcacttatatatcacttcctcactgaagactttttaaacacccagtactaggcagtatcatctggtgtttactgacaaagatggtgtctttgctgccatgccttattttgtaaggatttgcttatatctttcttccgctccgagagacaagctccacaagagcagaaacagtctgtgtcttattcattgttttattttcagtgctcggtgtaatgcctagcatagagtatgagctttgactttgcaaatgccattccttctacttgaagtgtgttttctagttttgtaaacctcagatttactttaacttttttccaagaagcttcctataccacattcatacaaaaaaaaaaaaaggttaaatactacctactttgtgccaccactttacttcgtacatgcttccactgttgcacttttcaaaatttttatttctttagcatgtggagtttactttgagctgcactgcctaaataattttttatctcctcgcaacatataaaaatcagtgcatttcacaattaacaaatcagaacatatggcaatactggatacaatattcccccatgacaattattcaccttgagcgaagtagttgtccaggttaaacagtgcatgccatctccagttcactagaaatatcactagataagccacaatcatcacccattttgagtctgcaatcactagtacaagtttatctcttttactaagtaagtagttttttactttgtgagttctttgaaataacgaggtgaattttaatcattttgaatcctgtactacccagcatgttccctgggatatagcaggtgctcaataatgttatttaattgatagattgggaaatttatttaaaaagattaatgcttttctgttgatatttaattttaattaaatttccatttttatgagatccactgtgggaacctactacaggagattaattaaaataatgaatatgaactcaaggacagttctgaaatatacatgtttaacattgaatgaattaatacttatttaatccacagagttaggtcagctgtggcatcatttccaaaagaagctatttcatacccagcagtagagaattgtacattgggcatttgagaatatcatcgtaatgagaaactaagatcttgagttagaaaaactgagtagtttctagaaaggaaaactcgttctaataccaacaaccaatcctaatcggggtcctagtatctgggtactagtgctattacatatgcttatgaatgagctgaaataattagaagtataactctcacttcaaatgaaaaagtgacagtgttgctgtttcatgtctctaacagaccttgataatactgacactcattttttgatgcttgtagaactctcttatttcagattttgtagtctgcataattccaaaaattatttgatataaaaaaagacttgaaagtgtaaaatgtaaaaatgccaagagtcctgggaggccaaggcgggtggatcacatgaggtcaggagttcgaggccagcctggtcaacatggtgaaaccttgtctctactaaaaatacaaaaaaaaaaaaaaaaccgtagcgggcgtggtggtacacgcctgtaatcccagctacttggaaggctgaggaaggagaattgcttgaacacgggaggcaaaaattgcagtgagccaagatcatgccattgcactctagcctgggcgacagagcaagactctgtctctaaataaataaataaataaataaataaaattaaataaaattccaagggtcattctttctttaattgtgtctctttaacaatatttgagcacatgttcaaatatggtagtacaccacctcataaacaatttggttattaacgttgtagcaaatattacagttaattttaaaagttttttacatttagaaagtctgaagggcagtctcttctgcctttaataaggcagatcctctaatacagcatatagtttcttatctctagtgtgtttggccctttaatagtgacataaactttgaattaagggtaacaaaagccttaatattaataaagatgatgacgaatgtgaatgtgaaatttttgcacatacagtatattgaaaacaactatatagtctagtcaatgggcattaggaaatgaaaatatgatgtgtagattaatttgtaacagatggaagacatacaaaagagattaagttctacatcaaatcatacaaactaaaaattagacatttattggttttcatttataaataacgaaatgttcagcacaaataatttagattcaaatatttaagcaaggaaaaactccgaagtttttaacttatttcctcaaaattatattttataaggaatttcatgatgtattgaaatatgactcctctttctgccattcatttctatgttcttaagggttcttgataagacagagtgcttgaggggaaaaagagagatttttgaaataagcatcaattgcagtcaggtgttaattacaatctcagcctttcaatttttcatataatgagtcattgtttttattaagtactaataagaataaatgatcttacttagtaaataataccaccagttcccttttaaaaatgcaatattatttactacactactcatgattttttaaatattttctacgtgtttacctttttctcttaaaagtgagaaattcatactgtaccaaaacatttaaatagcatataaaattttttccaccctgatgctaccacaattagaaataaaaataaaaatttttcccactattgtgtgtcttttaaatatttttttactagagtggtcaaagcatctaaaaaactgactttatgtagttcatacagttcattgtttgcattttttaaaacaggaccacatgcactttgccactacttatatttttaatattcttagttgaacaaaaaatataatttccattttttatatatagtgtcttcaaaaagggttaaaattgtgatcctacaaaatggtttacatcattttattatacttttttaacatttctctaagaaaattgttaaattatttcctgtaagtagcagaggatatattttttaaactgtcatatgaggaaacactttagtatgtaatttccaaaagttacacaaaaatgtggtcctgaaaataaataccacattttccaacctttattagtagtgcttgaacttatattgagaagtaggagaaagtgtgatttttgtccttatcacagaacatataggttaatttttgcacattgaaatattgcacgtataaattggtttatttttccatttgccaaagtgtcacaaatatcaaatggcaaacgttgctttcacttcagacaattcagaaggcctgttgaattgattaccacttccagttgtttgtttggtgtaaaaaaaatgaagaaaatattattattttttctttgcaattgccataaagtatgagtggtatagaacataacatttctgaaatgttgaataacaatctgaccaaaaaaaataatctgaccaaaaaaaaaaaacttcttacctttgtcttggaatacatcttggatattttaactgccctctgtcacattgcattctaagtatagatccagtaatatataattcagctggataagtatctcctctacaaataaactcaatatattcaccatgcaaaatgtgtggtctattgtcaaaatcccatttcagaagtaaattattcttttccatttcagtaaaagataatgtgcatggctctgggaacaacaatttaaaaaaaaagaaagaaaaagaagaaaactatcttgttacatcttggtaagaacaggaatcgttgtgttgcctactcatgaggaccttaaaattctcaggcctaagagcagcaagtcagttaatcagaattaatatttgagtcagaaaatatgttcaaatctcacagaaaacagtgagccatttctctctgtggtcctggatttggagaaaaggtattttcttccagttttaaaaactaaaaggtattttagttttatgtcattagctttttcaaagatagcaaacaaacaaaaaggtatttggggggaagcattgacagttactaatggtcattgatatcatgctcttttcccttttccttcttcagaaagttcaaataaaattctcatgagacaaattattaattgctgtataaataacattttatggaaatgtagattctcaacactgacccaagctttataacctcatgccatccaaaatggttgacagttacttctctttcaaatttctagttaagaaatatcaagactggattaagacgttttaaattctaagcatacaaagtatagttgtgtcctttcccatgtatcgtaaaccaaagagaatggtaaagtatgtattaaaatacacaaaaaaacctcttcgattttttttacagaataaaaacattaatatttctaaaatatcaaatatcaaattatttcagaaaatgggatttcttatgtccttatttgtctcctggatgacctagcattaaggaataacttctgagacaggtaaaaaggtccagagttgctaatatggcatatcaatcatatacctgtagtacattaacaaacttacttacagtatgcccctccctgattgcctacaggggatacatttcaagagccccagtgcatgcctgaaaccgcagataatgctaaaccctgttgtcattcttttggaacatgtttctgttcatgtcttctgcccacaaatttaatgcctcttccacctcaactaaacatttattatacactgtggcttgtaacttttgcagtttgaggtgcaacaacgaaactagcatggatttctttttccttcttcacactttcatagacagaagactcattgttaccatggatcttagcaacctcagcatacatttatttttcctttctttttaagttaagaatttccgccctttcacttaaaggaagcactttacagcttctttttagcatatctggggcaggaaggatggaatggcatgaaattttattatactactaagtgcataatttaaaatttataagttgtttatttctgaaattttcaatttaacgttttcagactgcagtttatagcaggtaactgaaaccacagaaagtgaaaccgcagctgagagcactgtgttcagttactttcttcaacaactacttattaaatgcctatgtgtcaaacattatgctggaagtgctacaggtgatgaaaatgaacaagaattattacactcattacaaaatagttgtgaaaatgaagtcgaatagcactataatttacgatgtcactgttctacagaacatgagatttaaattaaaataaatttaaaagttgattcatggacctttaactttcagctatgacagaggagattatatcaaaccagcacttctattaagaaccagaaaatctgaaaaacaggaagcatttcgaggtatcagaaaacctccaaggaacttagtcaaggaagtaaggttctggaaaaaatgtattcaggtgagttcaacatctatgtgaggctgggcgtggtgactcacacctgtaatcccagcactttgggaggccaaggcgggcggatcatctgaggtcaggagtttgagaccagcctggccaacatggtgaaaccccatctctacaaaaaaaaaaaaaaaatagccgggcatggtggcatgcacctgtaatcccagctactcgggaaagctgaggcagaagaatctcttgaacctagaaggtggaggttgcagtgagcagggatcgcaccactgcactccagcctgggcaacaaaaggagactgtctaaaaaaaaaaaaaaattctatgtgccatttttttctcttgaggtgtttgttgactctaagtctgacctgagaggttagatgatagagaatggtaagcttaggcatacagccagcagaacttctgaaaatctcatggagttgaagatagaaaaatgagaatttcggtaaaccaaagcagccaggacttgaagaataaagaatttagaaggataggaagtgtagagatatgagtttgaggctctgcactagcttttccctaaggtactgcttatccttgacttgtatagaggcataggatgagaagccaagcagaaagtaaataaaaagttacagtgggcatttggcagtctcccagtaatatcagagacagtcaaggagaaaaagctttaatacacacaacaaaccctctgtaaagagccctggagagttacagtctgtgagaaaaggcaaacagaggtctgaaaacaaacatagagaaagctttatttctaattgtattaaaaccaactgcctctacactaatcatcagccagaggatgagatgagtcttctttggagtaagctgacatcatccaaacatcctgaaattttccacgtataatatttggaattcaatcaactgttaacaaaaatatcaagaatttggggctaaaaaatagatccagatattggagtttgcagacaagccttaataaaaagtatgaattatatgttcaagaagttgatgttaagctaggatctttcatcagataactcaaatctacaaaaagaaaatataaaatagaaatgcaaagatgataactgaaattgagaactcaaaagatgagtttaaagcagattggatacatctaaagagaggattgttaaactagaagaaaattaccaaatagaaacaaagaaatgatacaatgagaaaattaccaaaaaattactacagtgaaacaagaagaaaatgagagaaaatatagatttaaagagacaatggcatagcaaaaagatgtaatatatgtaatatggcatcacagaagaggtgagaaatgtacattttaaaagatattagccaaacatttctaaaacccatgaaggatatcaagtacatcaaggttcaaggaatgctactaacttgaagaacaaaatgtacaaagagagtctcattgtgttgcactgatctccctgggagctgcagaccggagctgttcctattcggccatcttggaactaactcatatatatatatatttatatatatatagagagagagagagaaagagagagagggagagatttgtttctgatttgtttctaaggaactccagcctgggcagcacagtgagaaatggtacactcctgaccaaatactgtgcttttcccaaggtcttagccaccgacagaccaggagataccctcccttgcctggctcagcagtttccacgcccatggagccttgctcactgctagctcagcagtctgagatcaacctgtgacacgacagcgttatggggggagggtcgtctactattgctgagcaggggttacaatcctagtctctgataaaacagactttaaaccaacaaagatcaaaagagacaaagaaggccattacataatggtaaagggatcaattcaacaagaagaactaactattctaaatatatatgcacccaattcaggagcacccaggttaataaagcaagtccttagagacctgcaaagagatttagactcccacacaataataatgggagactttaacaccccactgtcaatactagacagatcaacgagacagaaggtaaataagaatatccaggacttgaactcagctctggaccaagcagacctaatggacatctgcataactctccactccaaatcaaaagaatatacattcttctcagcaccacactgcacttattccaaaattgaccacataactgcaagtaaaacactctttggcaaatgaaaaagaacagaaatcacaacaaactgtctctcagaccacagtgcaatcaaattagaactcaggattaagaaactcactcaaaactgcacaactacatggaaactgaacagcctactcctgaatgactactagataaataacgaaatgaaggcagaaataaagatgttctttgaacccagtaaggacaaagacactacgtaccagaatctctgggacacatttaaagcagtgtgtagtgggaaatttatagcactaaatgcccacaagagaatgcaggaaagatctaaaatcgacaccctaacatcacaatgaaagaactagagaagcaagagcaaacacattcaaacgctagcagaaggcaagaaataactaagatcagagcagaactgaaggaaatagagacacaaaaaatcccttcaaaaaaatcaatgaatccaggaactgtttttttaaaaaagataaacaaactacatagactgagagcaagactaataaagaagaaaagagagaagaatcaaatagatgcaataaaatataataaagggaatatcaccaccaatcccacagaaatacaaactaccatcagagaatactataaacactctatgcaaataaactagaaaatctagaagaaatggacaaattcctggacacatacacccttccaagactaaaccagaaagaagttgaatgtctgaatagaccaataacagggtctgaaattgaggcaataattaatagcctacaaatcaaaaaaagcccaggaccagatggattcacagccgaattctaccaaaggtacaaagaggagctggtaccattccttctgaaactattccaatcaatagaaaaagagggaatcctccctaattcatttaatgaagtcagcatcatcctgatatcaaagcctggcagagacacaacaacaacaaaaaacagaatttagaccaatattcctgatgaacatcgatgtgaaaatcctcaataaaatactggcaaaccaaatccagcagcacatcaaaaagcttatccaccacgatcaagatggcttcatccctgggatgcaatgctggttcaacatacacaaatcaataaacataatccatgacataaacaggaccaatgacaaaaaccacatgattatctcaatagattcagaaaaagccttcgacaaaattcaacagcccttcatgctaaaaactctcaataaacaaggtattgagggaatgtacctcaaaataatatgagctgttcatgacaaacccaccaccaatatcttactgaatgggcaaaaagtggaagcatttgctttgaaaactggcacaagacagggatgccctctctcaccactcctattcaacatagtgttggaagttctggccagggcaatctgtcaagagaaagaaataaatggtattaaattaggaaaagaggaattcaaattgtccctgtttgcagataacatgattatatatttagaaaaccccatcgtctcagcccaaaatctccttaagctgataaacaatttcaggaaagtctcaggatacaaaatcaatggcaaaaatcacaagcattcctatacatcaataatagacaaacagagagccaaattatgagtgaacccccattcacaattacttcaaagagaataaaatacctaggaatccaacttacaagggatgtgaaggacctcttcaagaactactaaccactgcccaacgaaataaaagatgacacaaacaaatggaagaacattccatgctcatggataggaagaatcaatatcgtgaaaatggccatgctgcctaaggtaatttatagattcaatgccatccccatcaaactaccattgactttcttcacagaattggacaaaactactttaaaattcatatggaaccaaaaaagagcccgcattgccaagacaatcctaagcaaaaagaacaaagctggaggcatcaggctacctgacttcaaactataatacaaggctacagtaaccaaaacagcatgatactggtaccaaaacagatatatagaccaatggaacagaacagaggcctcagaaataatgcacacacatacaaccatctgatgtttgacaaacctgacaaaaacaagaaatgggaaatgatttcctatttcataaatggtgttgggaaaactggctagccatatgtagaaagctgaaactggatcacttccttataccttatacaaaaattaactcaagatgcattaaaaatttaaatgtaagacctaacaccatacaaaccctagaagaaaacctaggcaatatcattcaggacataggcattggcaagtacttcatgactaaaacaccaaaagtaatggcaacaaaagccaaaatagacaaatggaatttaattgaactaaagagcttctgcacagcaaaagaaacgatcatcagagtgaacaggcaacctacagaatgggagaaaatttttgcaatctatccatctgacaaagagctaccatccagaatctacaaagagcttaaaaagtttacgagaaaaaaacaaccccatcaaaaagtgggcaaaggatacgaacagacacttctcaaaagaagacatttatgcagccaacagacatatgaaaaaatgctcatcatcactggtcatcagaaccacaatgagagaccatctcactccagttacaatggcgatcattaaaatgtcaggaaacagcagatgctggaaaggatgtggagaaataggagcgcttttacactgttggtgggagtatgaactagttcaatcattgtggaagacagtgtggcgactcctcaaggatctagaactagaaataccatttgacctagtgatctcattactgggtatatacccaaaggattataagtcattctgctataaagacaaatgcacagatatgttttttgcagaactattcacaatagcaaaacttggaaccaacccaaatgtctatcaatgatagactggattaagaaaatgtggcacatacacaccatggaatactatgcagccattaaaaaggatgagttcatgccctttgcagggacatggatgaagctggaagccatcattgtaagcaaactattacaaggacagaaaaccaaacactgcatgttctcactcataggtgagtgttgaagaatgagaacacatggacacagggcagggaatatcaaacaccagggcctgtctgtgggggtctgggggagggatagctttaggagaaatacctaatgtaaatgaagagttgatgggtgcagcaaaccaacatggcacatgtatacctatgtaacaaacctgcacattgtgcatatgtaccctagaacttaaaatattatatatatatatgtgtatatatatatacacacacacctatatggagagagagagagaaagagggagatgaccaatgggatatacatggagtatagtaacatacacctagtatagaaagttggtagggttggtaggtataaacagaaatatattagtaattacatgaatatgtaaatagactattccattacaagggaaaaaattataaactgcataagtatattttaaaataaggtatatattgcttataagagaggcacactaaaagtaaaaacccagaaggttgaaagttaagggatggaaaaatgtgtactacatgaatgcttgtcaaaagccccttggtgcagctaaaggagacctcaaggcaaaaaaaaaggcaaagcattactatatatgaaggaggtcttttaaaattagacaatgccaatacaccaagatacgaagatttagtgtctcaatttgtgtgtgtacctaatgaaatagtatcaaaatacaaaagcaaaaatggacagaactaaaattagtaatgttttaaaatgccaagtgagactttaacatgcttctctccgtgattgatagaaaacaaacacacacaaatcagtacagctttggattaacttaaacatcaaaaacaaaactcaatccaattcacatatataaaacagtgaacccaacaatgacaaagttaacttttttcaagtatgaaaagaacgtttacctaaagcaaatacatgcttgttataaagcaaatatcaacaaattttaaagtgcagatataattcaaagtatgtcttaattgaattaaactagaaatcagtaaccaaaagaaaactagaaaatcccctaaatattcagaactttaaaaagaaacttctaaatgattcagagcacagagaatatatcaaaatgaatactataaaatttttgagctgaatgacagtaaaaatccaagatataaaaatggtttggatgaagttaaagttgtgctcagagagaaatttctatttttaaattcatgtattagaaaaaatataaatgctgaaaattagtaatctatgtattcatctaaacaagccagaaaaagagtaacaaaagaaatccaagaacatagaagaaaggaaataataaagataatagcataattaataaaatagaaagcaaaatttgatgaatcaacaaatgcaaatgttggttttttgaaaacactaataaaatgtatagacccttagcaaggcatgtcaagacagatacatattaatagaagtaataacaaaagatacatcaataaaaacatcaaaaagaggataggaagatgtcataactactttatgttagtagatttgacaatgtagttgtaatgaaccatcaagaaaccactccctaccaaaactgacagaagaagaaataattaccattatttgttaaacaaatcgaagctgtcaatttgtcttttcacggaaaaactcaagtcccagatggcttctctggttaactcttaaaattataaaggaagaaatagcatcaatccagagaaccagaaaagacggaacacttcccattcatgggatgaggtcagcacagacttgatatcaaaccagaaaggaaaataaccaaccagtctttctcatgaaaatagatgagtaaaatattgataaataaaaatataacatataatatgcataatttatcacaaccttgtggaatttcttatgggaatagaatcatgctttaacattcaaaagaagcaatataattcattaaatttgcaggggaaaaaacaaaagtaataattatgtaattatttcaacagatattgctaaaaattaaacacagattgaagattctttaaaaatactttcggcaaaatagaaagaaaggtttttatacctttaacttgatttttaaaaaaatatttataacaacacatagaggtgaattatcaaaggttttacttatgagaatgggaagcaaataaagatatccactacctcttccattcaacattgtactgaagtcctagccagtgaaagaagataagagaagtaaataaaagtcagaattggaaataaaaaatattttcttattatttacagatgtgctatttcatgcctctgagggccttagtaaatgttgttactcttactaggatgccttgctaataaaacattaacttgcttcatctttccatattgagttgtccatttctttatttccgcattgttttctattatacatgtttccctaatgttttctattatagtaccaatcacaatgaatgataattgttaaagtttactcacaccactatggcttattcaacttatagcccataccaacctgatgtgtggtttgtctttaaaaaaatatgtattacaacaaactgaactataggtatttatgatctagaggaaagaatagaaagcagtgataaaataagcacatgaataaaataacacaaatgtagcaaatatagcattatattagtgttatgttaactcaaaaatgacagcaaattaaaaatatatagttttactttgttagaggcatatttagtagtacatacctaaacacaatggtggtgtagtccacattccatctaaacaataggcctccctagatccttctaggaaatggtgatcaaaacatctgtattctactgaagagccattttcataggtgtctactgttgaactaataatgactccatgtttaataagaggaggagatgtgcacattcctttagattctgcaaaaataagttttaaagtatacaatgaattgctataatgaacatccagtactttataagtgctacagagacagagtctccctctgtcacccaggctggagtatggtggcatgatcatgactcactgcaacctctgcctcccaggctcaagtgatcctcctgtcttagcctcccaactagttgggactacaggtgcatttttcttttgtagagacagggtctcactatgttgctcaggttggtcttgaattcctgggctcaagaaatctgcccaccttggcctcccaaagtgctgggattacaggcgtgagccactgcacctagccataaagccattttttaggcagttctcaaatatttttaaaatattgaagatgtttttgcaataatattataccatacaatgtatttttataattagaatcccacgttatagtgtttacatgcatatttaaaactatgagagtattaacaatcatgattttatttctccctaagtgtatatgggatttttctagaagccatgatttctgtatatattattttccttttcttccttattaaaagtaatagtccctatagccagtgagtactgagacaatgggtccccagaaagccctaagtagagcaatgctttacagtgtttgttgttgagtgctcacaagaaggtgatcaattctctgatagtctggcaacatttataaaacctcttgattttttcccttcataaaattgacttattggaattaaaagatgtcagcatggccatcctatataggtatatatgctgattgaagtttggaagttggatcactcctctcaactttatagattagaatatgatggtggtgaattggggtcataggtataaattttctctaaagatcagcgatgttgagctttttcctcatatgtttgttggccacataaatgtcttcttttgagaagtgactgtttatatcctttgcctactttttgatggtgttgttcgtttttttcttgtaaatttgtgttaagttccatgtagattctggatattagacctttgtcacatgggcagattgcaaaaattttctcccattctgtaagtttcctgttcactctgatgatagtttcttttgctgtgcagaagctctttaggttaattagatctcatttgtcagttttggctctcatcgcaattgcttttggcattttcgtcattaagtatttgcccatgcctatgtcctgaatggtattgcctaggttttcttctagagtttttatggtttggggtttttacatttaaatctttaatccatcttgagttaatttttgtataaggtgtaatcacaatgagacaccatttcacaccagtcagaatggcaattactaaaaagccaagaaacaatagatgctggtaaggctggggagaaataggaatgcttttacactgctgatgggaatgtaaattagttcaaccattgtggaagacagtgtggtgattcctcaaggacctagaaccagaaatgaaattcgacgcagcaattccattactggaattgcaaaccaccatggcacacgtatacccatgtaacaaacctgcacattctgcacttgtgtctcagaactcaaagtaaaataaaataaaataaaacaaaattaaaaagaataataataagaaaaatagcaacaaactataaataaattttcaaccgaggtagcagatattggtcaagtaaagatacttgcagagaacattattattttaccttttctagtacataaaggatatttcacttctcctctgttgcactgcacagataattcagacaatggggttaatggagataagtcatatccctgtttacatacaaaatctattaaatctccatgtaagactttcccttcatatttccacttcatttctatgttatttctgttcatgtaatccacattaacagtacatggttctgtaaaacaaaatgctcttttaaattctttacttgtctgacaaatataaaagtgatattttttaaaacaaaaattatgacaagtttcaaaagcaatattttataattgaaatcataattaaggcttctctcacacacatatatatataagaaaatatatactttattactatcaaatgaatctatacattattgtcataaactaaaaccacttaatttaaaacatcaaaaatactatttaagggcatcaatcagttagattaataataattttctttctataaaataaaaacctttaactaccatgtagaaaataatagaaaacctgctaatgaataaaaccaagactcctgctcccatggagcttaccttctaactgggagaaacacctacaatacataataaatataataaagacatgaattgtataatttgtggctgatatggtttggctgtgtgcctacccaaatctcatcttgaattgtagctcccataattcccatatgtcatgggaggaacctggttggaggtaattgaatcctggggtgggtctttcccatgctgttctcattacagtgaataagtctcatgagatctgatggttttataaaggggagtttccctgcacatgctctcttgcttgccaccttgtaagacgttccatgcttctcctttgtcttctaccatgattgtgaggcctccccagccatgtggaactgtgagtgcattaaatctctttcctttataaattacccagtctcaggtatgtctttattagcagcatgagaacagactaacacagtggccatctttaaactacagcataagataaattagatgaaaaaaagagtactggagcaggagggggtaacaaaagagctaggtgaagagaagttgcacttttcagtaaggtgattagggtaggcctaaataagaagtaaaaaagcttgaaggggactttgcacaaaagcttgaaggagactgagtgaaccatgtcattttcttatgaaagagtgtcccaagcaaagggaacaaccagtgcaaaggccctgaagtgagagcattcttggcttgtttgtggaagagtaaggagaccagaaagactggagtgattagagcagggaagagagtatggagaggttagagagactcttaatgtctggaataataattcctacagagaaaattctatgctttatcatactgttgtgaatttgtactgatagcctttccagtttcaatagttaccaagatatacaaagcccctttctcttgccctgataacaatgattaatcttcatttggtatttgctttgattcattaggaccaaacctaactctcttgaggcagttgttccagatatagaatgatgtatttccttaaatgttgttatttccttatgagcttgtttcattaccagctttgccataaatattttaatctagtctttgtccttagagattactatatctccactcaatgcaatatcaaccaaagcatcaaaaacttaatatcaaaaacatttataaaaatatgagaccaatagcaaaattctatgtgaatatgtatctgtatctgaatttgaatgggaatcgactcctaagaattacttgaaaggtggaaactactaacaaaaggttgaaagagctcaagacttaaaacatacacttatatatacttaaaaacactataaataaaaataaattaaaaataattgcaataaacatgattctcaattggataaaataatttatatatagatttataagtatgaaaaaatggctaaactatgaataattaattcatgtaaaaaaacctgtggctactagaaagttaaaaaattccaaattaattaattcttaaataaatcaaattaaaataattgtgcttgcctgcttaacaaaaaatgtcaagattaaaatattcaaagttaacaaagattaggatgattactactttaattcacttatggtagggttaacaaagcagaacaaactttctgatagacaatttgccaattaatagaaaaagaattaaaattcctgatctcatgataattatttttaacaaaaataaatatgtttaacatgtacaaagatttacttgaaagtgtactgtttggaatataaaaatgttgaacactaaacatccatcaataaactggttaaattacatatgtatatctgcattatggaatactatgcagccattaaagtatatattgtagaagtatgacaaaccatgtttacaatatattttgagtgaaaaaatctaagatatatacctctgcatcatatcatagcattttgtggagtgtgtgcttgtgtgtgtaaaacatttagaagaccatttattatctaagtcattagcaaacacttttatataatcaacaagatgtaacaaacgtgtccattcagatgaggatgcggtggtaaaatttagcaatatactctatataatatactctataatatattagcaatatactctaccaaggaaagaataggactaattattcttcttgaaatgacattctgagggcaatacaagcagagatattgagggctgtataccagggagggaatttcagctaggagaaagacaacccaaaagctaattggtcacaaaaatgttaatatacttaatgccactgaattgtacacttaaaaatagctacggtggtaaattttatgttatgtatattttaccacaatagaaaaaatacactaatattttagggactttctacttaaagaaatgagagagaaaacacttgtgaaaaaagatttgtacaaaatcatcattttcatgatataaaacactgtaagaaaatcacataaaagtacaaacgtagacattccatgtgttctctttcttacccaagcaaacaggtggggatgaccattttccttgttcgcaacgagatatttttgatcccctcagtaagtaatattcattgcatctatattccactgaggatcctgttgcatagcttgccaatatcccgtctgcaacagccccattcattacaacaggaggatgcttacaattctcattattttctaagaaaagaggttgttttaaaattaatatgagctcataacaatatactatagtaactcatactatagtgtctcgatatttgtattatataatttaggacaattgttttataaattcattacaaatatgaaaaattttttcagctcaaatatttttaaaatttgctaagcaagagttgacagcaaatatgttacctaaaaacaactatacgtatttttctcttttctcaattgtgaaggaattatgatatacacatttcttaaacctatagaatgagaaactgttcttcaacctaaagattatggtcaattctaaaattgctctttggcattaccccacttttattttcttctttttcattcctcttcatctcaggtctcaatagacccatgaaggaaatatcaatttttttcctctttttggtatctttctctcactttatctatttctttagcatccttcattgcttttgtcttatttaataaatatcctagataaacatgtgtgtggagatgttgctctgatctgattaagaaatgagatagatgacaggaagagtagtctccaggaatgatagtgtagcctggtggtgcctttcagtaaaatgaaagaccagggacatgtctcagaagggcataaggttcagaatggccagatgcaaaatatcagcaggacttacccaaggtcaagaacagaatgcactaccctaactttgcaggacatatggggagaagaagtagataatgctcatggcccgtcactcaatccaccatgcccttatttacttatctaatgaagcacatcgtcatttatgtgttgtcatttagaacttacaggtaatggcatgacacagatcagataaccgtgcttagcactagcgttcaaaaaaaacttttgtttaagaattctttacattgacttaaattctacagatagctacacatacaggcacacacacatgcacacatgcaaagcagaagagtaggtgctgtagcaatgtgtttctaatttgcctaagcagtggtcttttcctaggaatattcagattaaagtaacagaatggaaaattttacaccataagtttagctactgatggtaaatgtagcatacataccaacacactcaggaggaagtgtccattttccacgattacaagttatctcattcgatccatggagaaggtagccgcttttacatgcatatgtcactttatccccattgtaataaatcttagagtgtaaatttgctgcaccattttcaatgaagggtggttcctcacaggctaccttctcctgtccttctgaaaaggtacagttgaaagagaactgaccatttagctacacatgcagatttcattttagcaaagcttcttcaaggtgttactaaccaatgcattttggaggttctgtccattttccatcttcacaacgtatttctgctgacccatggatctcaaaattaagttcacattctatatgaactatttctccatgacgataagttgttgaatgtgtttgaattttggagtttatgggcagaggtggaggaggacatctgtttcttcttccttatggaaaaaattaatcagcacctttagtcatataattacaaaaaataataaagattaaattaaaatattcatcatgtcaagcatcatagagagaatggcagactgattctaggagcattcctttgatcctcacctcctgatgttaacttccttgtgtgatacccctttccatgagtaggacctgtgacttgcttctagcccacaaaatacagcaaaggtgatggattagtacgtgattatgcacacataattatgtaacatcagtttttaacgccattcttgccaagagactctctatccttgctggttttgaagaaacaagaggctacatcatgagcttccaaagcagaacggctgcaaggcaaggggcagagggctgccttcagttaacagccacaagaaacagaggctctcagttcagcagtctgcaaagcactgaatgctgccaataactacagtgagtttggaagaagtcttgcccagtcaagcctcagatgagactgcagtccagctaacatcttgattgcagctttgatagccatcgatgcaaggagtcggttaagccgcacccagacccccaacctacacccaatgggaaataatttctttgtgttgttttaacctgctgagtttgtggtgacattgttacgcaccaatagaatactaacacagcaggcattttacattcattacctcttttagtcctaaaataactttattaagtaggaactattatttctcccatgttatagacaaactaaaacttatgaagtaaataaattaatagcatgtagcagatctgttcttgaacccacgtctgtctaaattaaagtctcctgctctaaaatactgaccacactactttcctattgctgctttgatgaattacaatttagtggcttaaaacagcacagatttatcctcctacagtcctagaggccagaagtccagagtcagtttcactggactaaaatcgagatatcaggagagccacattcctgctggagactttggaggagaatcagctactttgccttttctagcttcttgaaatcacctgtattccttggctcacaaccccttcctcaaaacatttcaacctgtggcttccattgtcacatctcctgcttcctcttctgcagtcaatctccctctgcctcccttttataaaagcatttgtgattatatttagagtctggatagatagttccagataatattcctaccttaagattgttaacctcaaagtgtcttgtaccgtgtaaggtaacgtttaatggttctcagtattagaatgtggctatattttgggaggagtaagagagatataattcagcccacaactgaattatattgttgtgggctgaattatattagccattgtatgcctaatgactgtttaccggaaaaaacaggcatgttgtcatgctggctaatttggaagaggagaagggtataaaaggccttaagtaggtctgccatttatttttgaagtagcactttgagaggctgaggcaggctgatcacctgaggtcaggagttcaagaccagcctgaccaacgtggcaaaaccctgtctctactaaaaacacaaaaaaattagctgggcatggtggccgacacctgtagtcccagctactcaggaggctgaggcaggagaatcacttgaacctgggaggtggaggttgcagtgagctgagatcgtgccactgcactctagcttaggcgacacagcaggactccatctcaaaaaaataaaaaataaataaggaataatagactttaaaaaaatttgcttaaaaaatctacttctctactactataccaaggatgtcgagcacaaatgaaaaatcataaaatctttaaagttactgtacagtgcatttagggaattatgatagttctggcaatcccactgcatacccatggtcagagccctcatttgtttcccctagcacctgtttcaaatcttcaccactttcctccaagttctaccttcatgtctttcacctgcctgtcaatagaccttatatcccatattacagaaaataaaaaatgactatcaaaccctttgcctcaccctatcctcccaattctcaaactgctacttatctcttaagacccaacttaaatattgtccatcacttctgtgaatgctattccacagcataccaatcagaatctctaatgtttattcctgcactttgtacctgagttgattgtaccatttgtcacattatagcaattatttttttcatatctgcaattactgttttcatatcttctgctagtataggaccctcctcatattaaattgtaggtttgtttaaataactatggatgtcttctgacaggtaattgcattacctgtttggacacttccagtaatagaaatgtgaccatagatattacatttttgggcagcttttacaagatgacctcttttcccattttcacttctgggcattattcttctgcttttcctgctttctctgctttctacctcactattttggagattaatttttacatctggaaatatgtggcaaattaagagaaaatatccttgcaaagctgccagattggggtaattagtcctaataattcccaataagaaaagttattcgttataataagggatttaaaatgtataatagatattttaaaataataaatttaaaagatatagtcatttacaaactaagacaaaacaagatttattcaggtgggatatattaaagattgctgaaaatagcactgatttaaaagataatatttattttaaaaataggactcaggaaaaaaaatagatatgaccacaggaattttgtcagagctaatagagattaaagctgataaagacatggcattttgcgagtattaaatttaaaaatttaccttcgcatacaggagattctgggtaccaaccaaagttatagcattgaattaaatcagatccacttagataataattttcatgacagaaaaactgaacgacatctccttcttcataggtttgctttacaggatgaaaataaccattttcaattaatcttaaagaagagcactttaattctgcaaataaaagaatgaataaaattacaaacaaatgtttattttttctgctacaacaaaatgcactatttacatgacataactagaatagaaattaaatttgccaaaaagcttatgaattcattttatatatttgttaaatatcattaggcttattctaatttaattctgtgagctaaaatgaatttattctacttgagagctttaattatcaaagactgctatcaacataattaaaaataaaggcaaaaatgcatgaaaaggtgaaacataatgagcatgacaacttatatacacttctctatgagaaaaagctttcagagtgagagtagattttattccaaatgagaacctactggtacattttggtgtgagagaccatccgtatgtgagacattctacctcctctgtcttctttcctccagctgtgtagtagccagtagcacattcgtattgtactttgtccttcactttgaatgttttctgtgttgtggaataatttccattatataattcaggagccaaacatgtttctaaaattataaaaattatttattttataaacttttttaataacctagattataaaaaatctcaaaatatggttttacaaatcttaagaatacatggtaaaatcaactcttagcaaaattgaaaaatagccccaatttttctttgcctctattctcttcttcatacaccttgtgacctaactctaccagttttctgtttttaaaattctagtctacaagtgcttgaccaaaggccaaaattcaactaaaggcttgtgcagtagcaattgtgaaagtatgtgctgtctatgcatttttacaatttaaacaacttactaacaaagtatacatatatttaaattattgaactatttttaagtatatctgacattggttcacaatataaaataatgtacatgatcttaaattcttctgtaataaaggaaatagtgacatataaagaaaaagcttctttcattttattccattccaattccttttattgatgcaaagtaggaactattggcgtaggtgggttgtagggattgagaacatttggattaaggaatcacctagtacttgagaaaagcaatgtaatatcaacttcctgcattgtagacataatgaaaaataaattctattaaataatagatatcaatataagcttcaatatattcaatataagcttgataagcacttatcttcagttttaggaaatgattcttataccatgttctttcctacaggttggttgagaagaccatccatcagagagacattgaaccacttcttcatccttccctccagtggttttgtaccctgaagcgcaaccataacgcatgttctcttgaattttatacaataactttacatcagagatgtaaccattactcaggtcaggcttagtgcatttttctatgggaaaaaaaattatttaacttaatgatgaaactaagcttgtcttttactaaattgtaaaattaagccaaaagtataatgttattattggcgatttcattttggaaatatctgcataatttttttgaaaatggattcaatttaacactgactctctttgtatttactaattttagttcttatagtaatttctacccctaccacatctacttctagataggtttactagatatatcaaccacaatagccatattcaacatcctcttttaaacgaaactggctcaaccaaagccccttactctgggtcacctgccctagtggaagatcattgatagtttgatgatagtgtagcctgatataaaataatgaaatgagtcaattagattaccttctcacaactttgaactcaaactttcaattcaaaattgaaaaacacatttttcaatgggtatcatgagagaagttggcacatgaagagagatgagtcttacaaatgataaagcattagagtagcaatcttgcccttccagaggccagagtttcaagcatttttctggcatcttatgcttaattatcaaaataagtttcttgttacttaaagtaaattacctctctttgccttgcaatatgataatttcagttattaccctattcccttcaacagagtattattaaaaacagatacagaaaataacattttaatgtaaaagcattatttactggatttcaaattatgccttcattttgtagaaagacagattgctagtgattttgttcttatctactaaaaggtttaaccgctttccatttttattggacccctatttttatatacaaatttctttgagtattgaaacattgagtgacatatccagctgacttactgaagcaccttggctctggagaccagccttctgttgtacacgtggtttgctcttcttgtcttccactttcagtggtataaccagccaagcagaaaaatgacaattttttgtctatgctcattggaaagtaaaagcttttaaaagtatagtaatattgggcaattcttccattttccacatgaggaaaaccacagggtttctctgaaatgagtaaatgtcaagctgaaaatggaaaaacaaatctaaaaacataaatttgtaatcaggtgacaatacaaactaaaagtttttagagacacttcaactagtacttatttttcttacttaaatttttaaggtacttttgtgacaactcaagcagtccttttatcataattgatctgcaaatgactttaaacatccaacagtcatgataaaatttagcagaccactttttcagggaagctttgcataacttcgtagaacagtacttttttttttcttcctagacacagagtcttcctcagttatccaagcttcagtgcagtgctgaaatatagctcactgccaccaggagctcctgggcttaagcaagcctcctctcctgtagctaggactgcaggcacatgccaccacatctggctaatttttgttttattttttgtagagatgaggggtctcactctgttgctcacgctggtctcaaactcctggactcaaaggatccttctgctttggcctcccaaagcactaggattacaagacttgaaccactccaccctgcctgcacttcctaatagatatgtattgtaagtcacttatgtaatttaaaaatttctaatagtcacattcataaaaatactaaggaacaattgaagttagttttaataataggtttttatttaacccaatatattgaaaatattttacattctttttttttctaactctttaaaatccactacatatttatacttacagaatatctgatcttgaactagtgacattttaagtactgtctccaatagctatatgtggctgatggccactgtattggacagtacagttcaggaataggtaaagtttctccttaacatatgctaactcataaaaaattttgaaataaatagcattaaaagaaaaaacagacaaccaagtaaaacaaagcaatacttggcaagaacttggcaaaataggatatttaaatggttagagacctggtacttagcattactagtcatcagggaaatgaaaatttaaaccaccatgagatactactgcatatccaatagaactgctgaaatgaaaaagacaagctatctcaatgattgtgaagaagtgaagaaactggaactcgcatatttctacaactgaaagtataaatcagtccaaactctatgagagaacacctttgcaatatatattggggtaaaacatgtacaaaccatattacccaataaaaaaagcacatatttgtataccaaaagacatggaaaaaaatgcttatagtggcagtattcatatagtcccaaactgggaacaatctaaatgcccataaataatagaaaagataaacacattttagactatgcatacaatggaatattatccaacaacagaaatgaacaaatggtgaatctcataaacataatattgagtgaaagaagccaatcacatatgaattaatgtatacatttgcataactttttaaaagaaaacaaactaatccatgataatagaagtcagaatggttacctttggggtttagtgccttagaaggatcatatttctggggtactatcactgttctatatcttgatctggatggtgtaaaattttgtaaaaactatataagtgtatcctgtgatttttgcatttttctggatatgttatactccaaataaaacatatattttaaaaatatatctttatgttgaagatcttaaagtcataaaaacacttaaaagaaagaaatgctcgaacaatcctaggagctgtggtgggaagaaacatgggcagtcatggatggaagaaggcctagatccagtgtgattactacggcttcaatgccttggttgatcactgtataccttaatgctactatgagacataaaatactagtagtgctagcctaggtttgaaggaaatggatgtggaatgatgagcaacaaaacttccactatctgatggagcagacagaaaaacatgggctggatagtccccattccttgagaattattctcaccattttttcacacccaagcaccaaaggaatttacaataaaaagagtcttccaaaatagcagtgcaatggtgaatacacaagaaatttccctgaggggcacagttgcttgtcagggaggggcagcaaagtattctctgcacaacaatcctaggttgtggctttaaagactctctgtcctgggacatctccctccaccaccaggataggcacattatttgttaaggtagctggaatgccttggagaatatgaattcctgacaaaaaattaatgagaaatgtgaggaatatactaatcacatataaaccaggaaatcacagatgtctgaacatattaaaaaaagtacatgaagcgatggacacacttactactgatcagagaatggtaaataaataaaaatgggatatcactttatgaataaccatatagcaaccagtacaaaaatggacaatatgaggtgttggtgagaatgatgaggagcaacaatttacatcctctctcagagatgatatacttcaaaactgccattctgcaaaagtaatctctcattacagaaatcaagtacaagaatagactcaataatgctatctgtgagtgaatacagactgatgacattcttacagaaagataagttggttatattacaatattcattccagagctatttgtggttgagagagctagagtaacatgttaaaacattgtagtaggtcccaggggaaatggacttcaagattaggaataaggggataaaatgtgtaagtaaagcaagagtgagacctttcataggccaataatacttgcataccatgaaatgagaaacacaattaattcaattcttgtccctgaagtgcacaatgggagttgagagaagcatgcaaaaataaaatcattgtcttggtcttcaagcagcttacttttttttttgttgtgtaaaatagcattataaccttataataattagaaaattaactagaatattgcaatgtctttatggtatagataacagacaattatatctgctggtatttccctatttagacagaaaaataaaatcaaaagaaattcatgcaaaaatcatcctattatagaattaaaagtataaaataagattaattctgtgtctttcacttttataattttaattatagatgttttggtagaaaatttatagttaactattcaactaaaacacagttaaaacttatgtatttaatttcaacaaattcccaaaaatgtttattttagaaaagctgtattgctgtagcttccttctttgtatgttcactcttgctaatgctaagtgtcctccctggattcttcatcctatggcctgataatattgataatgttcctgaacaacatacccatgtacactgcctagcttccactcgcacactaatcttacacattgggcaatctgactataaagctttctaatagggagtccataggtattggtttgtttggaaagtcctgatttacatgtgttgtccaaacagttattaatagagcccctcttttactctctaagtgtccctgtttgtacaagcaattatatggttcacctactaatcactacttaatgtctccaacaaatgaataattcattgtgataaaaatcaaagtctcaaaagtaaaaaatatttatggctatttccttttcaaatttcccacattaaactctcaccttatgaacagaattaaaattgtacaagttttgtcagtattaggaatggattctagcataaatttagaattaaagttaacatgtgacttcgaaatggacatattgttaacctgaaaaccttttcgaagtatttagatcctggtctcctatgccccctagagatacaagggtttttgttttgttttgcttttctgacttatgctactgtaagaacactttactaattttgctcaaaggaaaaggtctaaatattataaaaagttatatttataaaatatgttataaaattgataatgaaaatagaagagtatattaaaacttgagttgtataaatattagaatctccatttgtatgttttagagaataaagaatattaagaattaattttaccttctgcatagagttctcctgagattatcaatatgatgataaaagtcaggtttttcaacctcatcttcagtggtgtgcttcacaaagattttaacaattctaagcactaggaacttgtcattaagtacacaatacttctcttgaggaaaaagttaataatttataacctctgtctaagtccttttgtaacgagtcttatatttcacttaaaatattttgaaataatgttaaaataacacaactatattaattgacattacttaccatgtcagagtccagtaagagcatgataactgattagggcaacaatagcagcagaataaataataaattatagcagcagaataaataatactaggtaaattttcaacctaagttcccaattgtaaattcatagagtaaagttcacttgaggccatagatctttactaatattgatcaggtaaaaagatgaacttaggaacatgagataacagatacctgatgttgaaatatgttgttgcctagactgcactccttaaagagatacagaaccatagttgtctcaatgatagaatagtattacttataatagtagtgtttgacatttagagagtttttactttgtggcaggtggtgagatcagcactgtgctatatcaacattcattcatgagaaatgtttagaacgtccatgataatggcagcacatgtaacagttttgaggtatttagcagtgaaaaaactggattaaaattattgccctcatggagtttacattctaatgagttttaatttaaaatacaaaataggaaaaaatggtggataggaggcaggactaacttgcagctcccacttggatggacagagcaggatgtggagactcgcattgtgaacttttgctccaagaactgctgcaaggatataacaggaaagccaagataatccacagaccctctgaagaaagtatattgctcctgcatgacccagaaaatagcccacatactgtgaatgcccaaactgtgaaaagtgtgaaaggggtattgtccacccctgaacacacacccttggggaacctgaaggtctagatcacaggagaaggatttgaccttacctggagctcagacaatttagagagctgagcgaaatacaggggtagaggaagcaaagggtaaagccccatcgtctctgtgggtccccagagaagccatttctgacttgtctcacaggggctgccggaggaactgggaaaagaccacagggagaaggaaacctccagctgaacttagtaacaattccaaccgaacacaaactttcctgtccagaactcaggaaagggcgtgaatctggtgtgcagacttaacaggtagggaggcacaaaagtctggcttgcattctcagctgggaggctagtagcctggggcaagttctcaatcctgctcccctactgcctggaaacaaattcggtgctttttgggggaacacagtagaagtgagatttgcttgttgggttgtgtgagagctgggtgaggtctgtaactgccagctttcccccacttccctgacaacctgcatgacacagaagaggcagccataatcctcctgggaaggtaactccattaacctgggaatcacacccccattccccacagagccacaacaagccccacccaagaagactctgagctcagacatgcctaaccctgcccccacctgatggtccttccctacccaccctggtagctgaagacaaaggtcatattctcttggaagttctagtgtcccacccaccacctgatcctcccctatataccacagctgatgctctcatgaaagcactacctcatggcagtgtgtctggaattggttccttccaatgggttcttggtcttgctgacttcaagaatgaagctgcggacgcttgcggtgagcattacagtttttaaagatggtgtgtccggagtttgttcctctgatgttcagatgtgtccagagtttcttccttctggtgggttcctggtcttgctgacttcaggagtgaagccgcagaccttcacagtgagtgttacagctctaaaagatggtgcgtccggagttgtttcttcctcctggtgggttcgaggtcttgctgacttcaggagtgaagccacagaccttcgcggtgagtgttacagctcataaaggtagtgcagacccaaaaagagagcagcagcaagatttattgcaaagagcgaaagaacaaagtttccacagcctggaaggggaccagaccaggttgctgcggctggctcgggtggccagcttttattcccttatttggctccgcccacatcccgctgattggcacattttacagagtgctggttggtctgtttttacaaagtgctgattggtgcatttacaaacctttagctagacacagagcgctgattggtgtgtttacaatcctttagctagacagaaaagttctccaagtccccattcgacccaggaagtccagctggcttcacctctcagcaggaggccaaccagcaccaaactagtgcatcaaacaactacaactaaggaccctcacagagttcctttcactcccctgccacctctactggaacaggtgctggtatccatgactgagagaactgaagacagtttacatcacaggactctatgcagacaacccccagtaccagcccagagcctggtagcccttctggtggctagatccagaaaagtaataataatcactacagtttggctctcaggaagtcacatccctaggaaaagggggagaatactacatcaagggagcaccccgtgggacaaaagaatctgaacagcagccttgagccccagatctcccctctgacatagcctacccaaaagagaaggaactagaaaaacaattttggtattatgacaaaacaaggttctttaacaccacccaaaaatcacactagctcatcagcaatggatccaaaccaagaagaaattcctgaactgccagaaaaagaattcagaagtttgattattaagctaatcaaggaggcaccagagagaggtgaaatccaacttaaggatatcaaaaaaatgacacaagatatgagcggagaaatcttcagtgaaatagatagcataaataaaaaacagtcacaacttcaagaaataaagaacacacttagagaaaagcaaaatgtactggaaagtctcagcaatataataaaacaagcagaagaaagaacttcagagcttgaagacaaggttttcgaagtaatccaatccaaaaaagacaaagaaaaaaatttaagtgaataaagcctccaagaagtttgggattatgttaaatgactaaacctaagaataattggtgttcctgaggaagaagaaaaatctgaaaatttggaaaacatatttagggaaataattgaaaaaaaaaaacttccctggccttgctagaaatctagccatccatacacaagaagctcaaagaacacttgggaaatcatcataaaaatatcattacggccgggcacagtggctcatgcctgtaatcccagcactttgggaggccgagggaggtggatcatgaggtcaggaaatcaagaccatcttggccaaaatggtgaaaccctgtctctactaaaatacaaaaaaaaaaaaaaaatttagctgggcatggtggcatatgcctgtaaccccaactacgtgggaggctgatgcacggcaattgcttgaacccaagaggtggaggttgcagtgagttgagatcgtgccactgcactccagcctggcgacagagcaagactccatctcaaaaaaaaaaaaaaaagattattgcagctaagtgtggtggcttatgcctgtaatctcaacactttgggaggatgaggtgggcagatcacgaggtcaagagatcaagaccgtcttggccaacatggtgaaaccccatctttactaaaaatacaaaaattagctgggcgtggtgccatgcctgtagtcctagctactcaggaggctgaggcaagagaatcacttgaagccaggaggcagaggttgcagtgagctgagatcgcgccactgcactccagcctggcagcagagcgagacaccatctcaaaataaataaataaataaatcttcacctaggcacatagtcatcagtttatctgaagtcaagacgaaagaatcttaagagctgtgaggcaaaagcaccaggtaacatacaaaagaaaacctatcagattcacagcagatttctaagcagaaatcctataagctagaagggattggggacctatcttcagcctccttaaaaaaaataattatcagctaagaattttgtatccagaaaagctaggcttcataaatgaaggaaagatacagtcttttttagacaaacaaatgctgagagaatttgccactaccaagccagcactacaagaactgctgaaaagagctctaaatcttgaaacaaatcctggaaacacaacaaaacagagcttcattaaagcatgaacctcacaggacccataaaacaaaaatacagtaaataaataaatacttaaataaataaaatcaaggtattcaggcaacaaatagcatgatgaatggaatggtacctcacatttcaatactaatgttgaatgtaaatggcctaaatgttccacttaaaagatacagaattgcagaatgggtaagaattcaccaaccaactatctgctgcctttaagagactcacctaacacatatggactcacataaacttaaggtaaaggggtgaaaaaagacaccccatgcaaatggacaccaaaagtgagcaggagtagctattcttatatcagacaaaacaaacttcaaagcaacagcagttaagaaagacaaagaaggacattatataatgataaaaggccttgtccaacaggaaaatatcacaatcttaattatacatgtacctaacactggaactcccaaatttataaaacaattactactagacctaagaaatgagacagacagcaacacaatactagtgggggacttcaatataccactgcactagatatgtcaccaagacagaaagtcaacaacaacaacaacaacaaaatggatttaaactataccctgggacaaatggacttagcagatatatacagaagattctacccaacaaccacagaatatacattctattcatcagcacatggaactttctacaagatagaccatatgataggccacaaaatgagcctcaataaattaaaaaaaaaaattatgtcaaacactctctcagaccacagtggaataaggtgaaaattaactccaaaaggaatcttcaaaaccatgcaaatacatggaaattaaataacctgctcctgaatgatcattgggccaacaatgaaagatggaaattaaaaaattatttgaactgaatgacaatagtgacataacctatcaaaacctctgggatacagcaaaaggtggtgctaagaggaaagttcattgtcctaaaggcctacatcaaaaagtctgaaagagcaccaacagataatttaaggtcacacctcaaggaactagagaaataagaacaaaccaaacctaagcccagcagaagaaaggaaataaccaagatcagagcagaactaaatgaaattgaaacaaaaaaaattgttttaaatatgaatgaaacaagaagctggttctttgaaaagataaataaaattgatagaccattatattaaccaagaataaccaagaaaagaaggaataaaatccaaataagttcaattagaaatgaaacgggagataatacaactgacaccacagaaaaagatcagtcaaatctactatgaacaccattacatgcataaactagaaaacctagaagagatgggccgggagcggtggcttacacctgtaatcccagcactttgggaggccgaggcgggaggatcacgaggtcaggagattgagaccatcctggctaacacagtgaaaccccgtctctactaaaaatacaaaaaaaaaaattagccgggcatggtggtgggcacctgtaacagctcccagctactagggaggctgaggaaggagaatggcgtgaacctgggaggcagagcttgcagtgagccaagatcccgccactgcactccagcctgggcaacagagcaagactccatctcaaaaaaaaaaaaagaaaaagtaaaagaaaaagaaaacctagaagagatgaataaattcctggaaaatacaaccctcctagcttaaatcaggaagaattagataccctgaacagaccaataacaagcagtgagattgaagtggtaacaaaaaaattaccaacaacaattccagggccagggattcacaacagaattataccagacactcaaagaaaaattggtgccactcctattgacaccatttcacaagacagagaaagagggaatcctccctaattcattctatgaagccagtatcaccctaacaccaaaaccaggaaaggacatgacaaaaaaaaagaaaactacaggccaatatccctggtgaacacagaaataaaaatccttaacaaaatactagctaactgaatccaataacatatcaaaaagataatccacaatgatcaagtgggtttcatactgcagggattgtttaacatacatacccaagtcagtaaatgcgatacaccacataaacagaattaaaaacaaaatcacatgatcatctcagtaaacacagtaaaatcatttgacaaaatccagcatccctttatgattaaaacgcttagtgaaattggcatacgagggacatacctcaatgtagtaaaagccatctatgacgaatccacaacaaacataatactgaatggggaaaagtcgaaagcattccctctgaaaactggaacaagataaggatgcccactctcaccagttctcttcaacatagtgctggaattcctagctagaaaaatcagacaagagaaagaaataaagggaaaccaaattggtaaagaggaagtcaaactttcactgtttactgatgatatgattgtatatctagaaaaccctaaggactcctccacaaagctcctggaactgatgaaagaattcagcaaagtttctgtacacaaaattaatgtacacaagtcagtagctctcctatacaccaacagcaaccaagctgaggatcaaatcaagaactcaactccttttacaatagctgcaagaaaaaaaaaatacaaaaaatacttaggaatatacctaaccaaaaaggtgaaaggcctctacaaagagaactacaaaacacagctgaaagaaatcatagatgacacaaatggaaacacatcccatgctcatcgatgagtggaatcaatattgtgaaaatgaccatactgccaaaagcagtttacaaattcaatgcaattcctatcaaaataccatcatcattcttcacagaactagaaaaaacaatactaaagtgtatatgaaaccaaaaagagagcccacacacccaaagcaagactaagcaaaaagaacaaatcatttggaggcatcatgttacctgacttcacactatactataaggccataggcaccaaaacatcatggtactggtataaaaataggcacatagaccaatggaacagaatggagaacccagaaataaacccaaatagttacagccaactgatcttcaacaagtcaaacaaaaacataaagtgggaaaggacaccctattcaacaaatggtgctgggataattgtcaagccatatgtaggagaatgaaattggatactcatctctcaccttacacaaaaaaaatcaactcaagatggatcaaggacttaaatctaagacatgaaactataaaaattctagaagataacattggaaaaacccttttagacattggcttaggcaaagacttcatgaccaagaacccaaaagcaaatgcaacaaaaacaaagattaatagatgggacttaattaaactaaagagcttctgcatggcaaaaggaacagtcagcagaataaacagggagaaagtcttcacaatctatgcatttgtcaaaggactaatgtctagaatctacaaagaacttaaacaaataagcaataaaaaaaaaaaacaatcccatccaaaagtagtctaaggacataaacagacaattctcaaaagaagatatacaaatggccaacaaatgtgtgaaaaaatgttcaacatcactcatgatcaggaaatccaaatctaaaccacaatgcaataccaccttactcctgcaatggccataataaaaaaataataataatagatgttggtgtggattcagtgaaaagggaacacttctatactgttggtgggaatgtaaactagtacaactactgtggaaaacagtgtggagattccttaaagaactaaaagtagaactaccatttgatccagcaatcccattactggttatctacccagaggaaaataagtcattatacaaaaaagatacttgcacaagcaggtgatgttaataacatcacaattcacaattgcaaaaatatggaaccagcccaaatgtccatcaacatcaatcaatgagtggataaaaaattgtgatatatatacaggatggaatactactcagccataaaaaggaatgagttaatggcattcacagcaacatgaatggaactggagacaattattctaagtgaagtaactcagaaatggaaagccaaatatcatatgttctcactcataattgggagctaagctatgaggatgcaaaggcataagaatgatacaatggattttggggattctggagaaaggtggaagggggctgagggataaaacactacaaatttggttcagcgtatactggttgggtgatgggtgcaccaaaatctcacagatcactgctaaagaacttactcatgtaaccaaatacagcctgttcccccaatagcctatggaaataaaaataaaataaaatagagtacaaaataattctgcaaggcagaagctattattatttcaattttgtattttttattaaatgtattaacagaaaagtgtacatatgttaagaattctcacaagtctaagacatccatgaatccacaacccagaacaaagaaggaatataccagcaccccaaaatccccctaccaagttactgcctacatctaccctagtgttaaacattatcttgacttctaataacatagatcaatcagtagttttatactatataaatggaatcatatgggaaatacatgtatatttttatgtctggttccttttgtttaacattttggttctgagatttatccatttgaggatacagtagatagcaccttttctaaatagtattgcattctgtaaatatgccataatttatccattcaactatttatgtaaatttgggttacttacaatttataaaaatcattgacatctgcttattttcaaatatttttttcacacaaaacctctacctagatgctatcattaacattttactatcgttttcttactaatttttaaatgcttcaattaacctaatttttcaacaataggtctccagaatgtattcattttgcataactgaaactttgttgcctttgaccaaaacctctttattttctcttccctgcaatcccctagcaaccaccaccattttactctctgtttccacttgtttgactgttttaaattccacacataaatgagaggatggagtatttgtctttctgtgtctagttatttcactccacataatgtcctccaggtccatccttgttgctgtcagtggcaggattttcttccttttttagactgtataatatgtcattgtatgcatataaagttgagccttaaaaaagtgggggttagggctgctgactctctgcacagtcaaaattctacatataacttgactctcccaagacttaactactaataccatgttgtgaactgaaagccttaccaataacacaaatagatgattaacacactttttttattatatgttatagaccatattcttacaatagagtaagctagaagaaagaaaatgtaactaataaaatcataaaaggaggaaatatatttactaagtgaaagtggatcatcataaa

SEQ ID NO: 406 - DNA, 156051 bp, Homo sapiens
caaagtgctgggattacaggcatgagccactgagccaggcctgagctcatatttaacatctcttctatagagacctgcactgttagctccctacaggatatacttggtgtgatgacattttcattcaaatgtgtcacacacgctctttctcttcaagtctggcatcactggaaaatgcagctcctacacacccacactttaacggcacagtgacaagtgcagtaattgcctaagtgttcacatgagcagagatttgcttggggaaaaaaaaatacttgccattctattcaagtggctcgttctgtttgcggtaaaggcagtaaactgctagcgaggaaattagattctgacaaacagctctccccccgccggtgcactaattgaaatggagcctaacgcctttcacgaagagctgtcagaacgtatagggaacgccagtcggccaaagagaaagagcagccgcgttgaccttcagaaagctactgacccaatgcagtagacttgagtcaaagtggggattgcggcgacaggggagcccatcaaccagaagaggacgggaggtggcgcgtggggggcgggagggttttccagtgggcctgatggacagcaaacctaagccttacatttacccctgtcactgaaaattgaatccatattagagcaaatttcacaaagacgattccattctggtttagactttgtttttcatggaaaaaattcacaggcctgggcgcagtggctcacgcctgtaatctcaacactttgtgaggccgaggcaggcgaatcacccaaggtcaggagttcaagacccacctggtcaacatagtgaaacccggtttctactaaaaatataaaaattagccaggcgtggtggcaggcatctgtaatcccagctactcggagactgaggcacgagaatcgcttgaaccccggaggcggaggtcgcagtgagctgagattgcaccactgcactccagcctgggtgacagagcaagactctgcctcaaaaaaaaaaaaaaaaaaaaaaaaaggccaggcacagtggctcacgcctgtaatcacagcactttgggaggccgaggcgggtggatcacctaaggtcaggagttcgagaccagcctggccaacatggtgaaaccctgtctctactaaaaatacaaaattagctgggtgtagtggtgcatgcctgtaatcccagctacttgggagtctgaggcaagagaatcacttgaacccaagaggtggaagttgcagtgagctgagatagcgccattgcactccagcatgggggacagagtgagatgccgtctcagaaagaaagaaaaagaaattcacaggaagagacagggaggcaggattatccagagctgtctatagcagagctgctgtgcacagagcctggtgctccagccctccgggctgggcggttgggaggagctcactgtaagcataccactctgaaatctctggtttagagcagcctagggcctttatgtcatccacgatgccataaaaaagttttctatgtatgccatgacatggaagaggtggggaaaacattggcatgaagtaacagcagaggactacatcagtgttaaggaaatctgaacacaatcctgtcagagttccagtgctgccgttctagaattttgttatcttataggtaatactttgaaaacaaataatccacatatctataaatccgtctggaagaggaacaaaaatgaatatacaaagatgtcattgttgtgaaaaaattaaaaaaatcttcaaagtagcaaaataaaataggtaaataagttatagtaaattcatgctatgaaatagtatacagctctttaaaatggaatttttctgaaaaggacacatactttaaagtgagaaaagcagggcacaaaatttgatacaagatacggattttgtaaaccgcactcagaaaataaaatcagatcattgcatgcaaaatagtgttcctgggtgatatgattataactattttttcaaaatagtttacttttttcaacttaaatataaaataaaacataaaaataaaaacgtgataatgtattcgatggcagttttaaaatgtaggattgcttgtatcccagaaatcttaagaaaatgtgtctaatcatttcatttctactttctatacctgtaacttacatggttgggaatacagtacggatgtccttttttaaaaaattaaaatatatacaacaccgtgaaggacttccttctagtgcagatgactgacaaaatgaagagaagatgcacctgttccagtggtgtctagtgatttgaacagaaagaaactgtgaagaaccaggaatgaaatcctgagatatgaaggggactgtctgaaatccatgtgcctttttgaggtagtttcgtatcatctcctggaagcagaaatgctacaaagcagtggaaggaagctggggttttccctgtcattggggagtttaactctggggagcttatttttccccaactttattaaggtatgatggataaatgaaaattgtatgtatttaaggtgtaccatgtgatgatttgatatgcatatacattgtgaaatgattacataatctgtctaattagcatatccatcccctcccataattaccttttttccgtggggaacacacttatgatttactctctcggtaaatgtcaagtatgcattattactaactataatcgttatgctgtacattagaacctgctcatcttatcctttaaccaacattgccccattaccacaacagattagagatttaaatctcttataatgcttatatttagacattttagaactctaaacttaaaaaaaaaacaattctgcttaataagagatttatccccagattatttgaagacaccaggaagagagaggtcagggaagggagtgtggcccagggtgaaggttcagcgaacacctgctagatgcatgcaggaatgaacatgccaacaagccttcccactgaatgcacccaagtagatgacatgagaatgcattctctgtctgcaacattcttggcttaacttgccactgactttagcaagcagccatgcattcctgtgatgcagctttaatggcctttcatttgctcacattggctgagccctgtgcagagtggatgccacctcccttcctgcagccctgccatcatgtccccaactgtcctcccccaaccctcctccactcctgtcacctcagttccaacaatatccttccttctctttttagcaggggatggtgagactaatttttccccaccccatctcgaaactaaggacttcagattgcatcttggtgttgcacttgaaacatcctaaagctaacctgtaagcttgtggcagctcctgggaggtggcatttcatagcttggtttatttgccaagttccctacactcttaggtatcaaagaatccagatgttcagtttctcctaatccctgttgataccctattttttttaaaataatagctagccctgattcctgtatgtctgaggattacagctattttttaaaatttaatttttaaagttctactagagatggggtctcactgcattgcccaggctgtcttgaactcccagccacaagtgatcgtttcaccttggcctcccaaagtgctgggattacaggcataagccaccatgcccagccccgattttgagttatcaattaataccagcattaaagtaggtgaagttctatgacagttcatttggcaactcaaagccctgctttccaagagcttattccagtgctttcattaaaagaggtaaactgaaacttttgagttcatgtcacccacattagcaatgtgtacgtgggtgcagccttcttcaatcgctatctttttagaatgagtcccttatttcctaggctaatgcttagtttctttgcaaaagtgcattcagactgaggtagcatccacttttaatgcttctgtgcattaaaagttgttgcgggaagtcagggaccccgaacggagggaccagctggagccacagcagagaaacataaattgtgaagatttcatggacgtttatcagttcccaaatactagttttataatttcttatgcctgcctttactttaatctcttaatcctgttatcttcataagctgaggatatacatcacctcaggaccactgtgataattgtgttaactgtataaattgattgtaaaacgtgtgtttgaacaatatgaaatcagtgcaccttgaaaaagaacagagtaacagcgatttttagggaacaagggaagataaccataaggtctgactgcctgtggggtcaggcaaaaaaagccctatttttcttcttgcagagagcctataaatggacgtgcaagtagggaagatatcgctaaattctttttctagcaaggaatattaatattagtaccctgggaaaggaatgcattcctggagggaggtctataaatggccgctctgggaatgtctgtcttatgcggttgagataaggactgagatgcgccctggtctcctgacgtaccctcaggcttactagggttgggaaaactacactctggtaaatttgtggtcagaccagttctctgctcttgaaccctgttttctgttgtttaagatgtttatcaagacatacaggcactgctgaacatggaccctcatcagtggttctgcttttgccctttgtcctgttccctcaggagcatgtgatctttgttagacccttattagtagttctgctttttgccctttgaagcatgtgatctttgtacctactccctgttttacgccccctccccttttgaaacccataataaaaacttgctggtctgagactcaggcgggcatcacggtcctaccgaaatgtgatgtcaccccggtggcccagctgtaacattcctctctttgtactgtctctatttctcagccagccgacacttacggaaaatagaaagaacctatgttgaaatattgggggtgggctcccccaataaaaagtggcccccagaggctaatacagcttctggaaaaacatttgctgtttctgggcactgggaaagtctacctcacttttcagcaggttgagtaggatggctccacacactctagaataaaaatgaacgtgataagcacaatcacttcaattgattcttcgcatcagacagacaaaaacaaaaacaaaaaaccccctaaattttagaggtagaattaagaaaaatagaaatttaaaagtttaaatacttactagacttttttctgtatatctcttcctttaagctgaaccataatttccaagggtaccaaataaagattgtgacaaatagtaagtggttttgaaatctagtgtgtgcgtgtctcatagaatccaggtgaaacccagggacatcagaactcgttcctcttgtaattgaaagtttgtaacctttaaccaacatttccccatttcccccaagggattaaagatatttaaatcttttataatatttatgtttaggcattttaaaaccttaaacttcttaaaaatgattctgctaaataagggaattatcccttagaaaaagaacaagaactggccaggcatggtggctcatgcctgtaatcccagcaattttggagggcgaagcaggtggatcacctgaggtcaggagttcaagaccagcctgaccaatatggagaaaccctgtctctactaaaaatacaaaattagccgggcgtggcagtacatgcctgtaatcccagctactcgggacgctgaggcaggagaatcgcttgaatcctggaggcagaggttgtggtgagccaaggtcatgccattgcactctagcctggtcaacaagagcaaaactccgtctcaaaaaaaaaaaataaataaataaaaccaagaactaacgaatagtgccagttttggtaggtagaagtttaagatggcctcaaagaacccatccctgtccttgggtacatggtgtaattcccccccgaaggtgaatgggacttgtgaatgtgatgggaattcccatggctaggttactaaccagctgacttttagttactcaaagtgagacttgatgtcctgagtgagcacctgaccaaatcacatgagcctttaaaaagggatcaggccgttcctgagatcaggaagcaggtgaagatgtagctacatgtgagagggctaaggagctaggacctgactcaagagaagctgtcaagaaagtggggacgggctgggcgcggtggctcacgcctgtaatcccagcactttgggaggctgaggcaggtggattatctgaggtcaggaggtcaataccagcctgagcaacatggtgaaacctcatctctactaaaaatacaaaaattagctgggtacggtggcgcgtgcctgtaatcccaggtacttgggaggctgaggcaggagaacggcttgaacctgggaggcagaggttgcagtgagccaagattgtgccattgcactccagcctgggcgacagagccagactccatgtcaaaaaaaaaaaaaaaaaaaaaaagtggggacagccagcaagaaacagggaacctctgtcctacagttagcaagtacagttagcaagaaaatgagaccagttctacaagtgcaagggactgaattctaccaagagcctcgtgagctccccagcctcagatgaaaccacagcctagctgacagcttgattccagcctgtgagaagctgagcagaaaacctggccatgccatgcccgggggttttgatctatgcaatgagaagtaataaatgggggtaattttaagccactaaatgtacggccatgtgctgtggagcaacagaacactgataccccaatgttcttccaaacactggaaaccggtggtgtgagcacattccggacttccaggttcagatggcggagggctacattctgccccttcttctcctgaaaatcaatcaaacaataactgtttaagtaaataaaacattattttaaaaaaggaaaatgaatctgaaacaggaaatgggggaaaaagttaaaaagcaattccattttcaatgcttttaagaggcgttgttaactgtaaaccacgctacagcagatgcaaggatcgggcagcagagcctggaggccatgggaacaggcccctttgtcacacatggaaggtaatgaagaatggggtgagtggcagggatgctgtctgaacggtgttcaagctgttagaatgcagattctcagctctatcctgagccgcctcgatgatgaaatagacaaagagaaagaagcaggaatgttctcgtaacccagaactagaggactaagggaatgacaaatctccagtccccttatctggccaatttcaaaataagagcaatgatatttcccaggctggaaacagaaggtccttcctcgggagaaactgaaactcttcaaagataagacaaagaaacggacaaagcaagctggcccacaatgtcacagagaagtccaggagctaaggagcacagtcatggctttctgtcagcttgggtgcctcattaggctcaagtcaagcaagaggaaagcctgcaaggtgaaaggggagcaagccctcctgaaaggaatatttaaaagccgtccaggggaaaaccaggcaaaatggaaggacttattctaaaatacatttagcaaaaatgagatactagggagcttcgaaacaggaacaaatgcctgtgtaatatagaaaagggacagtcaggaccagaccagtctcttaaacattaaaaatgacagcagaaataaaactggtaacagaaggaacagaagataaaagtggaatgaatcccagaaggggaataagacaaagatggacaataggagttcaatcaaaaaatgagagaatttagcaagtcaagcaacctatagttatgagtcttgacaagagaactgagatcacctcctttgagaattaaacgaagaactgagaaagcagaagggaagaaatgatcaaagaaataacacaagaacagtccccacaacgtggattttcattaaaaacggagtagcaatccctggaaaaggcccacgccaagacacagcagcaggaaatctcacaatgttgtagagaagtagcatgtccccagaagaatatccccaaagatttgtgagagtcatattaggccacgaataatgaactgggactaggaacaacactggacttttcaatgttaacatttgaagctggaagacagtgggttccatgacttcaagattctgaatgtaatttacctccaaaccagaaacctacacccaatctatcaagagtagaataaagacactttcagaaacacagtcacaaaaaattacttcccatgcaactctttctcagacaataacaggatatgctctatcaaaacaagagttaggccaagagaaaattacagagtccatggtaaggagaatattccggaacaacaactatagatgccgaagagaacaaaaaaatggagtctgggccaccaagccgaggggttccctgaggagaatgtccaagggaaaaaaaggagcggacagacttcctgctgtgaccatgtacatgacaggctgcacttgtgtttttcttgggcgttctcacactcctccctttacagtagcagctaatctgtctgcctggaacagttctcagagaaaccacgtggtattcttcctcatcaacttcaaggttggactcaaatgccgcttgccactgaggcctcctgtcttctcagaatgtcccttcccatcacaaccccttccccgtcccttcccatcacaatctcacacattccttcctcaatcacagtctctctcctcagcactcactactataaacactaccatgtatctcctgatcatctcctcctaccacctgtccccaccaaatgtaaattccaagatgacggaggacttttgtctgtctgttcaggcaaaataatatagtattattgagggaaaatgttttctgaatacatgaatagtcacaagtttaaaaaatgagtaaaataaaaagacaattgttaaaaaaagaaagttgctaagtaaatgaaaataaacatcatatactgcttggcacagcagtgaatacttacataatcaaaataatggaaacgctgtatatggattaatccaaaaattataactaatggtaggaaaacaagatcagtggaggtctattaggttacatggtcttcctccaacatcatagggagtcaacaggcaatttctaaatttagtgactcaagaaagaataatatatacatttgaaaatatgaaaggaagaatgagaaaaacagcttaaggagttgtaactgggtacagcaggttgcatgggactgctgttttattatatatattttagctctctttgatgtttttaaactatgtatttatattatttgataaaaaggcatttacttaaagggaaaacatgtttctccaaagttctaagaaagcttaattgtttgtcattcatatcatagtggcatatagtaagtactcaataaatgtgttggaagtagggatggattttgactgtataaaaatatataaaaaatagcttctggatctcacattaaatcatacagtactgtgtaagttgacaacagaaaggtataatgcttcacagagactgtttttgatataaaacattgacaaaggtgaaaaacatgtaagcattaaaattacaaccaataaattcatactaattaaaaatgtataaaattttcttggttttgtttaaaaatattaaaaagttatgctttttacttttgtggctatagttttgagccgtatcaagtagctatatactgccacctggtggctggctccgcttggacagcagggcttttggtcagggtagagaggattttcacatttacgccttgtccactaaaagcaaatacatcaatatccacccttccattcatccattcttctatctcagccactgaatcctgaacaggagtatcaatgggaaggaaaaagaggcataaagctcaagtattttattaataatttattgtcagtaagaaagactggctaatggtagttttcattaaaaacctttacaagaccattgcatcacaaatatacagacactataaaaactgtgtcatggtggttttggttctaaacaggtatgcagaaggtccccgttacactttccaataatgaaaaatgtttataattctaaatacagcaacccatgtaagacatgttcatgtatctgatctctccttcatcctatgtacagctagaaatgaatgactacactgaaatgtactaacaaaatgtcacacttcagtggaaaaagacagaatgaaaccctggttatagtaaaaaaaaaaaaatcagggtgctagataatggcactgacaccaccaaaattcagttgaaacaaatgcacaaaatatcttggaaatctagttaaaactatgaaaaatcaaatctgtacataaaatttacaaaaaaaagagacaggaaaattaaaataatcaaatctatataaatacatgaatcatgctgacaacacaggactgatttttcgtttgattattttaacacagacagatgtaaatcccaaaagacgttgggaaatggcacagccgatgaaaacctcacgatgacagtagttgggacactggaaatggctagcacgtccagaggcgcaggatccagcgcagccatgcccattcggctcaccaaaaaaagcttggaagcactgctgcaaagaacagcgcggattactcacatcacctctaggttcactaaagtcaggcactttggggggagttgagagtcagacttccgtgtgctgctgggaatccaggggcgggatcgtcacctcttcgaagtggccgtcgtccccgctctcatagtcactcatcatgacctcggactccacttcgcagcaggctgacacgtcagagcaggaggcggtggaggcgtacacagacatgggcatgctctcgacagcgggcgcctcgaagtgtctttgataccctggcgggtaaggggcatggggttctctacaagtactattctcaccagtgccttttgtttgaggttcagacatatcgaggggataaaaattgggcaaatactgattcaagttgaacctctgccggtttcttgatgaagaacccaagctacccgcggcaggcatgtctctaggagggtggatggattcaaactgattgctgaattcgggcggtaacggtggtagctcatcagctgcggggaagtcttctgggggtggaggaaaatcactttcgatgtcgtagcctccagggtaatagtccgtatcgatggcgtttggatctgctgagtacaggggtgtctgctcatcaatcacctcatagttggggaactcttgtatgtccggcagaggaacgcttggcatccaatctgatgtatcccagtgatacccttggtggaaaagaaaacagatgtcagtgtgttttctcctaagcttttgtgccatggaaagagagctcagtgtatcaaagacacaaagatgcaaccgcatttatgccttcattcaaagttcaccactggaaattcctcgtctttgctttgaagacatcccccaacccactccagtttaaagacccctatgaactaggctctagttctaaaatgtggacttacagttttatgtacgcaactaacattcaaggaaacaaaaggagtcctaagagaaatgggatgctagcatctaaattatatacatttttctacaaatgattctaaccatccttctggcttttcttctgtagaacccactgctctgtaggaagaagagtactgatccagtctcaggacattagtgaaatatccagtgtcacttgatctgcactacttctcattaaaaaaatactgattaatgcaacttaaaaaaattttgcatttctattttttatagagacagggtctcactatgttgcccaggctggtcttaaactcctggccacaaacaatcttgccaattcagcttcccgaagtgctgggattacaggtgtgagccatcaggcccagccaatgcaactttttaaagtaataaaagtaacctttaacatgctaaagtttagaaaataagcttccttcataataatgtagcaagtttaatattaaaattactatttttcattaaccctcagacaacaaattaacttaatataggtatgtatcaaagcatgccaattcaagcaaaatacaattgaacaagcgttgcaagattataacacagcctctgatacactgtaacaatcaatctgtgttacttccaaaaggactgtgatccttttagactatataaagcaccactattttaaaaaaaaacttccaattttggaatagttttttttttttcctccttaggatttaaaaaatccttggagaggcgggagaaggttaggcaatccgtgcttcaaatgcaatgcgcacacacatgcagccgtgtacttagttactgctgcaaacactgggcgacccagcgtagtcagtcagcactggggcaaggcttgacccattgtttttagtgagtatcaatgaataactggcatgcataagtcacctcttggtttgctgaggtcaggagcagccaaagattcttttggtggcagagtagaaaaaaaagaaaacatttgtaattaaaacagtcggctgaaaaggcaataaaggtaagtacacagaacaatgaaaactgcttacagaggcccaatcagccatacagcatgtccttacgccagtatctatgacaattccaaatggctgagaaatgtatgtaccacaaataaaatggaatatggaagtggaggaaagtgactgcggaatgaggaaccagaaatttggccagaaaactcaaatattactttcttttccttgtttctgacaatcacagcctgaaaacacagaatttccttaggaataatgaaaacaaaacaaacaggctctaataaaatataaactgatcagattacataggtgataatccaaatacatctacagctacataatgcacacactttatagcacactgcaacttcaaaggacattaaattcagaggaattcataggcaaacttagatacttaaagacagatgtacaagctgaagatctctccaaactgtatgtattttgaatatgctttaatattgacactgtgagccattccctaaagagaccacggctacacttaccccatgtctgtaattacacttgccctgccagggccccgcatctatacacagaagcccagcaggaagtgtaaccaaacgcatgtaaatcccactatcagttagggccatgagacgcctgcccaggccctggctaaccttcaggttctctctttgaaatggggtgaaaatccgttagagttgttatgaggattaaacaggatcatgcaggttaagcactgttagaaactatcaataactgtgaaagtagacatcacagcagaaaaacggtcacatccgtgattttttaaacaaggctttctatgcattcaacagtgttataatttgggacaaatatttgattgatagttcacttctagaaatttcagtaattttaaaagactgtggtgtctctaaaacatgaatacgccggcatttaggtaacatgtatctacagaatcatttttaagtctagtaacaaaagcagcaattcctttaaacaaaaaaagatcaacaacttttgttacgtaggcactagtaatagctttcaactttaaattccatgtgcacttcttggatatgccaaaaaatatttgtcaatgaaggagactgcaatgaaggaactgttgaaattctgcttctataagcttcaataatatttaaaatgctgaaggtcatcagtttaacactaaaacttcactagacaaaatacaggtatgtttctgatttgcccagtgaaaacatggtacttcttaggaaaagaagtgtaggcgtcatcagtaactataaccatgaacactggagtatctaagcctcttctgcctgatagcaaatggggcccagagctatcctccctcctcctgaaccttgacagcatcatgtcctagcataaaggatcccccgaactctatgatgacgtctgtgtactcgatggcctctgtaagcagttctcgagtgggatctctagaccggcaccatcagagctacctgggaactggtgaaaaatgcaaattctaaagtcccaacccagacctgttggatcagaaatgctggtgctgagaaccagcaattgggcttttaacagccctccagatgatctgattcacattacagtttgaaaagtactagcctgtgtcttccccatgtgatgaatttcagtgcactaataaagggctattttaatttaaaataatttggggaaggtgctcaatgtcctttcttacaactctgagcagataaagcttcacattaaataattttcactaaaccaaatatgaaaatattcttttaccatgctctacacccttttctttgatcatactcagggaaaaaccaaaagtgaagagtcagttacaggttaattatgaaagctttacattattcaagtcttattcctgtacatacgaagaagaatttttgtttcaaaaaaattttaggtaaaattacttctgaactttttcttgattgcaccacctacagataagctctccagatctcatgtaaatcactatgaatggtaaaaaggaacaaagacataacatacattgagatattttttgcaaagcactcatattacgtatatacacacctgcataaaataaaaggactcaaccccctcaaaaccacaaactgttttttcctaccattgcaatagcaatgcggccgagctctacgacacggctgctgcaagacacagacacaagcacgagcacttacaactgtaccttctgtgctcaccgtgtcaaccacagcattgacaaggtgcattacggtcactatggaagcttgcaaaaaggtacaaaagcagtcaattaggaacatcttcagttagttagaaaacagtgcatgaaataaagttttgtattataccatttctacctcagattccaaccgatgagtgctttaatacaaccacataatgatgcgtggtctcctcactgttagctgtgtgtctcagagacttttttaatcgagctatatatttgttattattaatcaaaggaataacgtaaacatattttattggaatttaaacaaaaaaacttttagctttaaattttttcacaattacaattatgcatcatgccaggccaaaacgattcttattttaacatcttacaggcaagactcgacattccaagactacagtctgtggttcgccactcttccggctgcttaatcactcacacattgtcccccaaaaaaaagaaattgaaggagaaacatatgcaatctaaaacaagaatgtttttgtccctgttctgattgctttccctgcaaatttctcgtctgtttgcagatggactaatcgctggtgagctaatgtacgagtataggaggagactctgtccgtctgtttcctgtgtaaattcccttttcatttgtgtatcagattgttttaaaataactatgccaaggtaaatatgtacgcatgtggtaggcagaaggctggccctcaaatagtccacgtcctaatcccaggagcctgtgaatatgtcactatacatggcaaaagggactttgttgacgcggttcagataaggaaattgagatgagggatttccctggattacctgggtgggcccagtgtaatcataagggtaacttttctgcacagaggcgttcccagttacggctggggggagctctgctgacagaagggtggtcaatgaaacactgtgttgctgtctctgagatggaagaaaccaagagccaaagaatgtgggcagcctctaaaaaccaggaaaggaaggaaaacaggttcttccctcgagctgcagaaggcaatgcagccctactgatcgcatgacttaagccctgtgagacacaggggttgggcttctaagctacagaatgacagcaacacaagtctacattgttttaggccacaaagtttgtggtaatctgtaatggccctggaaaaccgggaatacgacgcaggaacagactctcagcagactttcagtttacaactgataattacattatggtaatgagtaaaataaaaacactcctgtatatatgttttttctctgcattgtactatctggaagctagttttcataactaatttgaccataacttattgaaagcacttgggactatttttttttttgagacagagtctcgctctgtcgcccaggctggagtgcagtggcgtgacctcagctcactgcaagctacaactcccgggctcaggccattctcctgcctcagcctccccagtagctgggagtacaggtgcccaccaccacgcccggctgattttttttatatttttagtagagacggggtttcactgccaggacggtctcgatctcccaaccttgtgatccgcccgccttcacctcccaaagtgctgggattacaggcgtgagccactgcgcccggccacctgggactattattaagaagactgatgttccaacaacaagaactagaaagaaaatgctgataaaattctgaaatgtatttataaagagcatttaggggccaagatataaattattacataaactggaaacaggaacttcttagaattaaaattgataaaagacataattctatcttgttggtttaacaagcaaagctatgtccatacaccctattcctaatcaacacaggtatattttgataccatatatacggtatcaaaatatacctgtgttgattaggaatagagtgtgtatatatatatatacttgaaagtatatatatatatatatatatatacttgaaatcagaaatgatagcacatacttatagctatctttagtttgaaaaatgactgcaatagataatgactatatggatttatggactatatgatgtattatggactatattactctggattgaataattattagtggggttaccttttcccaccaataaaatatttgaaatgtataacatattaatatgtttaataataaacgtattacgtttatacaataaaaattatcattaaacttactaattctgagattcaaaaatttccactaaaaactacattgtgttactgaatattgacgtttttctctactggtatgtgttaatatggcaaagctagttatcaatgcaatttaccctatagggaaaccagatcaacataactggtggcaaagatcccactgttaaactttcttcattagaaatataatcaaacttactagcaatctcttaaactgtgctctggcagtacgctctgatccaaatgggagctggggccgcagtggggttgggggaggagacaaataaaaccttgtaatacccaaggtgctactgaaatcgaacatttcagactatcacatctcttcttagagggggtgtgtgtgtgtgtgtgtgtgagagagagtgtgtgtttgtgtgcgtgctgcgtggttaagaaagttgcgaggaagatttctgacaaacccacaaaactggggtgatattaactgttgtgaaaaaaagccaatataagattagtcgatcagatccttcaatgaatatgttcttctctattactgacaagttcaaacacctattcattaagaacagtttggctattttccccagcagacattcatgcaagtatgtatggtattgtttaaaagtggtccaagaaaaatgaaaatatggtgaggctttaagggtagatagtgcgtctacattgtgagataacacagtaacacaacaagcaagcaaagcgcagtgttgcagcacactgctgcctcaccattgtcatcgcacgattcggactggaaggagctcagagactgcacttcagacaggctttcccgggcactgtatggctgggaaggcttttcctctagaggcttcttggaaagacagggatcaagatccaccacttttgctaaaaggaaggatgacaaacagtaagtatatgggccaagacggttttgttcaccgctgaatcctgagacacaccatgcattacccaacgatggcctgagatttactcaataaatgaatgactgaaagaaaaacagaaacaccttacaaactcaaacgaagaaataaaaaacccctgcacagaaagacctccacatcatcttagagattattcatagagtagaaatcgcccataagcatgcctatgggtatcattagacagtaaaggctgctaaaattttgttttaaaatagtatgtacagctttaaaagaaaaaagcatcaaatatatgttaggtcactaatataaatatttccacttcgccaggtcatatttttaaaaatcctagcatgaaaatgctcccgattatttttttgacatattaataaactcaaaaaattatagatgagaacctttatcaattataaaatgaaatgatctctccagaatattaactaaacatgactagattcaatttcttaattaaaataacatcaaagccacaatgctaacccagcaatcgggacatccaaaaaagtttcaaatcatcatacggatttcagtctgagcatacttgtctctaatgaagagtacacacattttgactggacagaatttgtaacctcactgtttatctcaagtgacactttagtgagatgaaaaagtggctcttactgtcatagtcaaagtcccagctaggcttctggatggagtcgctgtcagaaggggagtttgaagggggtgggggaggcaggtttggcgccacgctgcagaccgccactgcttttcggtgcccgtgcacagactcggggttaaaagtgctgaattcgggatgctctgggatagcagatccttcgaaggaatttcggtccagattgtttcttgagtcacttggaatactcggggtgtaggaaataggccggacaggcacctggggtggtatgtctgagtaaatgttcttatttagcttggaatcaaaatacggtctttgcaagaaagccgtagcgggtcccaggtgcttgtctttaggttcagcctgatgcttctttttccgactaatcatcttacggcagagaacaaacaccaccaccagtaaaaatatccctgcaacaaacacaacgattccaattccttccgccaacccaatgttccacggcgtggacacatactggttgggcgcagcatcctcgcagtgacgtcccctgtactcgtggctgcagttgcagtgataggagccgtgcgtgttctcacagagggccccgtgcaggcaagggtttccagagcactcgtcgatatcactctgacacctgccaaggaagtcaggaatgaggagagacctctgtagcatacgccagcgtatgtcaggctcaatccttagagactgaagactaatccctccttgatgagctatgtgaagatcaaacccagataaaagacaactaaaaaatgtaacgtcgacaaccacgagaaaagaccttctgtggagaaaccaatcatgtgatcgcatgcttttgatgtatatttgggaaggaaacatatcaagccaatattaatggccattttcctaggatcaacagactattacatcaaccccattggctaaacattagtttttttcaagtattatatatactgtattcatctgcttgataattcattttaaagagtgaaaagattataaattatataaggggccaatatgaggattatcaaaatctgacataatgtagttcaaatcactgaaggtctgttgcatctgccagtcaatatgacgctatgaaaaggtatgaacctaaattttgaaagaaaccatttacctttctcccctaaaacccgaatcacactgacaaacggcgccatccaaactgtcaaagcatgttccgccattcttacagggttcatctttgcagtatggactaagctgacacctgaagagtaaggagaaacagacataaacctcatgatcctattgcaaataaatacagcaaaacagaaagcaaaacagaacacattagcaaattaacgtgcagactttttacatgtaccattatatgtttaagaattttatactacaattgattatgaaagttaagaaaaatacacatacctctgaccagtatataatcctctacactggcaaacaaagcctccgttgtcgacaacacacgtgcccccatagaggcatggcttggaggaacacggattgacgcttatctcacagtgggtccctatgtacaaggcactgcatttgcagtaataacctaaatcggcaaaaaggaacaaaaaagtcctatcactcaatgactcagaaacctggtcttaattatattgctttttatctttattctccgaggtctgtaaaagctcgtaaaattctcactctctctgggaaaaaagttggctacatcaacaagccttccactgctggtataaccaaaacacccagaattgaagagagaactcagttagctttagttcatcataatctgcattaagatcactaggtcacacatatagaggaggaaaatacagttctttacctgagtgaccatgtacgtagacagcaccacttaacatctcaatttatttgcaattcacaagcatttaaggattaaatgagaaaataatgaatgtgaaaagcactttgaagactataaattacctttcaatatttttattttttgagacagggtctcgctctgccacccaggctggagtgcagtggcgcaatctcagctcattgcatcctcaaactcccgggctcagggatcctcccacctcagcctcctgagtagctggaactagaggcatgccacatgcctggctgattttttaagtttttgtagagatggggtttccctgtaacgcccaggctgcctcacttctagcctcaagtgatcctcctgcctcagcctctcaaacatgtaaagatttaagaaaggagatcatcacatctgttcaaagcagtacgaagaatgtcgactccactttgtcaagtgacaggtggtgtggcagatcttctaactgcctgccttgagggcacaccgcagcacagtgcttccccgcccctccaaagctggcgtggctgtgggtttttctcaggatgaagaactgtggtgccctgggccagggcctttaggagccagggcacagctgccatactcctttactcctgcttcgggaccatgggagtgcatgtcaggaaagcacctctctcagcctcatccctaagtgacaaaatgaggacggcctccttgctaacctggtttggacgtgtaactaatatgagcacagtataaatgagagtgtttctgtggggatggcctggcccactctacgcacacagaatgcaaatatacctccctgagagaacagcagaaaaccaaagctttggaaatcccacttaatgacagtattatttttgctctgttcattataccaagctctatttggtatgacaactgtcattttcctaactgtaccctattattggtaagtgggcctaacaggagtccagggtgcaaaagacacaaagtaccccactacgccagggcttcaagacagacagatatggcaacacttcaggagggattcagggccttctggaaaatcatattcccaactattattgccagcaagaatctagcaggccccctacgctgagccattagataaaaggtgatacaaataacaaagaagggctaagcggtacgaattctaaattcccctgggccgatgactatggagttaaagaagagttctgagtcacttgaggtgcctcctgctcgggcactgggagggcactgcaggcgctcagcagtgggagccgtggtacctgcagcctgggcaccagaagggcagcagacccagctctgcccccgtatgagggatgctgctcgcttccaacactgactgcagtgtctgacaaaattatctgaatcaaaagagaaaaaaataaaaaaatacctggggagcttccccttaaatgtacacacgtgcagcattttaaagatggcaacattacggagcccacctccagcaggtgacggattgcaaacgcctccattctggcaagggttgctggcgcagtcttccgtggccgtcaggaagcagcctggagatacatccaccgactcttcgatgtgtgcatagcttctgggtttgctgtttaaagggagctcctgcccattcaaataaatggagtccatacaacccctgaaaccattaccaacttgaggacttcttccatgccttgttccctgctgacggatgtggccaccaaaaaacacatagttatccaggttcagggttttcagagtccctggggctgtgcccgatgcagtatgaacttggtctagaaccaagcgagcatagtttccattcacttccagggccactgcgtgccactgcccatcattgacctgaatgctctgaacagagacaattccagggccacttccacagtcaaacttgtactgcagccttccatgatgaatctaggataaaagcaatgactgttcacattactctcatagaaccttcaatgagagcacctgatcacaaatctacaggagagggcttagggagtgagggtagaagttaggccttacatttaagtactacagagcacagattcatttgtccactgtataaatcattaaaatgcgtcttttaggaatatcaagttaaaatgcacatccacaaagcatcatggaagcgaataattaactattaactgaacacataagcattaggtaatatcaaaagtcaaaactgaataatgtttttaaaaaaggtgggcaagatacataacacttgaaacacatgtaggatgtctctataaactgtaacagtttttgttttttgagacagtttcactcttgtcgcccaggctggagtgcagtggcgtgatctcaactcactgcaacctctgcctcccctgttcaagtgattctcgtgcctcagcctcctgagtagctggaattacaggcgtccgccaccaagtctggctaattttttgtatttttagtagagagcaggttttgccatgctggccaggctggtctcaaattcctgacctcaagtgatccacccgcctcagcttcccaaagtgctgggattacaggcgtgagccaccacacccagccaacattattaaaatggggcatcacctagagtttgaatgttaactgtcacatggacctaaatctctgtcatggcagggcaaaaagagctcttcatcccacaaagtctaaaacttgtacaggcatcaatgaattatttaaatgtggaattcaaccatttcacttactttattatctgtgcaaattaacaatctgaatataaaatgaaatttatggtttgaaagtcttccactaagatgcaacgctgtggagaaacatacctccaagatgctatagtcagttcctcgagcatacatgacaaccgcatgcgtggaatatgttctgagcctcatggtcagtttcatctctaatttgttttcattttccgtcagacggtatttcacgtagctgtttccagtcagtgtcatagatgaactccctgtgaatcacacagaggaaaaaataaaccagaaccaagtttaagcatattttttaaagtatgactcccctgcaccccttgagactgatttagggttttatttaagatgataacattttactatccaattctgtgggaaaacgtctatttgcttaatgaaaagcccagcatgactggctctctgtttggaaagaataaatttgacgactgcatcacagagaaatgaattctaaagtaatgaaagattaaatataaaaatgttcagtataaaattattagaagaaaatttcagaaaatagttatacatagcctcaaggtgatttaagaaaccttctcaagcaaaataaaacaatccccattccccaaagaagatgcaaatgtcatcaatctccacagatggcaactgttacataaaattatgtagaactgactaaataacaattgaatttcaaaatgacaagaggcatacttaacaaatcaaaagataacatcaatataaatgatataaagacagaggtaactgcaacactgtgaatgttaatactcctaatacacaagtaactctacacattgatactaagaaacaaataacccagaccatcaaacaacatgaacaggtagaggccacagcagaggcaatactgataggaaatgaacaaatgagatgaaaacttttaaagtagccagagaaatgcaaattaaaataataattagatatcacttcacacccataaaatagatggtggggaatttgttttataatcgaaaatgttcaatgatgtcaaaagaatggagagtgaaaccttcatacataactgggagaaataaaaattaatacgactttttggaaaactaatatagtgatacaaaaaaatttaaaatgtcattgatgtttgagatagcaaattctagttttataatctatacaccgtatagaaatgaacgcatcagtatgtaaagatacatgtataaagatttctttatctgaaagaaagagaacaactcgaatctttacacataagaacaatgttgaataagtacagccatgctagaaaatattatccagctatcaaaaagaatcaggtttaaaggtactggctcggaaccatacgaaaggtgctctttaccatactgctaagtggagggaaaaggcaacagggagagaactgtgtgagatatgatcactcttgaatttccaggaaaattaaactgctacataatggcactgcgttgttagctgtatgtctatataatcattgaagacacaggaggagggacaccaactatgaaccaaggggtgtgctgtaacaagaggaagcaaaacttactactgtcattctttattcatctccacatctgtcttcttacaataaacatactttgcaatatttttagactccaataaagaagaaaatggtaagaaacaatgaaaccgatttttaaaaataaaagtatacccaaccattcaactctcacctgggcactgaccaaacctgccgctgggacagacacaggtgtgtttctcctcccagggatcagacacacattcggatccctcagggcacggatcatcttcacagccatggtggacaggtgggcaccttccctcttcattcaaagaggggagaaagggaaaagataattaacagacatttcaagaacatcacctttcatgtatagccatcaaaggcttcaaaggccgtctgaaaccatctgtgacaccgactttcatacactcatgtgcagtacctttgcagagacacaccgctgccctgtggtggcggggagtcacaaaactcagtctggctgtgctgtgtgttgacatcacactttcatccacagacaccttttcatcgcagaacttccaggggcagtccagtcccgcgcagagtttctggaatacattcagtatcctaactccaatgatttcctcaatgtcagtcacggaagagttaatcttgtgcagaagttgttttgttgagatctgagcactacctggtttctctacaaaaagtaagacgtccagatgtgggtgaggttcagaggactgcaaactaacaatctgtatgtcgttcctcctcacacccaggatgttccgtaaagctcgctggaagttgcgccagtagtcaccaacgaattcttccggagtgaggttggcaaagcggatcgcgatggtgtggttcaacatctcctgtgtgacttgtctgatatgcactgtgatgtcggccaccgtcgtgaacttcccatctgttacgctgacattgagaaggtattgccctatgtctagctttttgtgtgctatcagcttgccccctgtgctggaaacagagaacaggttgtccatctgagggtcgagactgtaggttagagtatcatacacgtcctggtctgtggcatggatcttcccaatgacgccacctgagtattcttctccagaagaggtgatgaaaatctccaggggcaaaatcgcaggcggatagatgctctcctcaattaccctaatgtcaatgtatgtcaaagatgacaactgaggctttccattatctgccacctacaagaaaagaaaaataaaatcacctttgtctatggcactgtttataacttcttcaataaaaacatttgtattactcaagttcccaaaaaattactaactggtagatactcatttctccacacaagaaacgtatcaaagaaaaggacaaatttctttatagcacttcactaattcacactgaaacccagctctgtcaatgactatgacagaatcaacaatgagctccttcaaacacagcgggataaaaatggaaggtatggcaaaaaacaaagacagcaattctatgaaagtttgtttttgtatgaaatgtaagctgttcaaatagaagaggggaaccacgccaagcagctcttctctatgaatccacaaccaaaccacaaagaaagccattcataccttcacctgcagtaagtaatgatctttctccttcctcttgatggcagatgatgtcaggaggactccttgcgggttaacttcaaaagccttctcatcatttccagttacaatagtaaagaagaagggtggaccgttatgggaagaatcctcatctgttactaccagctgcagcacgctgaagcccactggcttattttcctgcacaagattagaaacaaaattaaacaaaaatcctggaacacagccaaatctatatgggacagacacatgagttttctataatataaaatacatacaaaacaaagcctttctgctctatctgaaaggaagagaagaaaggtggagacgggagtgtggtggtgaggaggagggaaaggagaaggggtgtagcgaaaagggaagaaaaaggaggatgaaggaaacatggtaagaaagggagtgtgaggaggaagagggaggaggggaagcagacacgaggaggagtgggggacaggaggaagagcagagaggaggaggagtgtaggagaagaagaggactggaggagaaaaggaagagacgaggccaggcgcggtggctcacgcctgtcatcccagcactttgggaggctgaggcgggcggatcacctgaggtcaggagttcgagaccagcctggccaacgtggtgaaaccccgtctctactaaaaatacaaaaattagccgggcgtggtggtgggtgcctgtaatctcagcacttggggctgaggcaggagaactgtttgaagccaggaggtggagggtgcagtgagctgagatcgtgccattgcactctagcctgggcaatgagtgtaactccatctcagaaaaaaaaaaaaaaaaaaagaggaagagaggaaggaagaggaggagtggggaggagaaagagaagaggttgacaagaggaggaaaagtgagaagggggaggaggaggggtagtgaggaggaggggtgatgaggaggagtggcgacgaggtggagggaggaggagaaagagtggagacagtgaaatggggaggaagtggagtagggaggaggttgggggaggaggtggagtggggaagaggcagagtggggaggaggaagaggaggagtggagaagaggtggagggaagaggaggagtggggaggggagtggggaggaggaagagaaggaggaggaatggagaagaggtggagggaggggggaggaatgggagggaggagtggggaggagggaagagtggggaggaggaagagaaggaggaggaatggaatggagaagaggtggagggaggaggagtagggaggaagaagagtggggtgaagaaagtggagtagaagatggagcgagaaggaaggattgggggctagaagaagagcaagagggaagaggaaggtcaaggggggaggagagggcagaggaaaagcaccagtggcagcaggtctgattaagcaataagctcttaggaatcctagaacagtgagaatatctcaaaaatcaaagcacggaaaggaaagagataaaagcttggctttatctttaaaatgctcatcttttaatactgatagcgacttcttgaattctacgtttcccatttttctagaaagaaacctttggataagaaagaaaagcaacagaggccaatggaaaagctcatttcaaagaaccccaggaccaccttggcactcgaagcccacctggataatgacactgtagtttcccctggagaagacgggcgcgttgtcattgacatcggacacatcgatgttcacggtcgtcgtgttgactctgggtggactgccattatcagaagcttgaaccgtgagcgtgtaacctgaaatcttttcaggcaaaagacagaatgcacgttcattttcacaaggccgacagagctccaatgaggagtgtcctcctgagagtcctgacgggcaggtcccagtgagctaccactatctgttgcatcctgcctgtgagcgatgccctaatctcctacaaacgagtgcatgcaagtaatacacatttcccaacagcaagaattaccaataatgattagattctctgatgcctcttaaatatgtacttgttttgtaaaagtcttttatcttgcagttctattaacagaaactaagacataaaagtaatacaaatgattaggacaagaagttaacatatctcaaatgctgttgcttcggtaagatgggagcagccttccttagggccccaagtttgctctcagtggaagtagacagacatgagctgcctcccgcaccttagcgctgactcatttccaatgcctcaggacactccagatcaccctccccctcaatttcacactcggattatactcagctgtctaaatccctcaggattagcttgtcaggacctcccacaaaagaaagaaagtcaagtgagatagcttctttttcagggcagttccctataaagctctgtcttctagaatgagttgtgggagaagccagaaagctggctagatcccagagtatgttctacagaacgttagtcctgcaagacgctccaatgaaaaagaattctgctggcgcattagcttgggaaataccacaggctagctcctttggtatctcacaatggacagaagtgtattaaaggatctgggttctttagtcaaagatactaaatttattctgccccacagtgggggcaatcctaagcatgcttcccaaatccttagaaagtcccttctcaacattcacacatcaaaggagaaattaaagaatttaatgaggtatctcatcactatctccccccaaattcctttaatcttagatacacccattattcttctgaaatttcattcttaatcatcaccagtgtccttctcattcccaaatcgaaggcttcttttggttctccttcacaggcctacctctctgaggtagttcctgctcagcttcccttcctggacataagtctgcacagatgagtgaatggatggatgaatggatggatgcatagatgggtggatgggtaactggatagataggtggatggataaatgggtgaatgaataactgtatagatgggtgaatgaatgggtaagtggatacatgggtgggtgggtgggtgagcaaatgggtaaccacatagatgggtagatggataactagatggacaggtgggtaggtggatggatggataactggatagatgggtggtgggtggatggacacatgactggatagatggatgggtggggtggatggatgggtaagtgaatagatatgtagatgggtgagtgaatagataactagatagatgggtgggtggacaggtcggtgggtggatggatgggtaggtgaatgggtgggtaggtgagtggggagatgcatgggtggatggataactggatggatgaatggatggatgactggataaatgggtggatggatactggataagtgggtgggtggatgttcagccttgctgcctctccttatttgttcatatttatctcaatccctcatgtcacttctatcaacatctccaacggcaagtaccatatctacacttagggttttccagtctctaaatctgactaaaatctccaaatactggctgagtaattctgcctgaatatgctatttccctttaaaaaccagcatattgaaaaccacattcattagcctctcccatcccttacacgtttatacctcataacttttctttaatggtactacccagtcaaagcaagaccaaaaaatcaggctgcctctgacaccaatgctttctacacggagccatatctaagctttgtggattctaatttttcctttgcaaatagtttcttcatttggtattcatagacaccaaaatccactggtgctcaagtccttgatataaaatggtgtagtatttgcatataacctatacacatcctcccaaacactttaagtcatctctagattatagtacctaatacagtatcaatgcaatgtaaatggttgttatactgcgggtcggggttgtattttttttgttgttgtattgttattttttattgtttttctttctttttctggaggcagggtctcactatgttgcccaggctggtcttcaactcctgggctcagtgaattctcccacctatgcctcccatgtagctgagactatcggaggaggccaccacacccgacattttttcttttctaatacttttcgatccatgttgagttgacttcacgaatgcagaatctgcagatagaggggagcaactgaccttcctcagctcacaaatgctcataccctagtgcctgaggcatcaggtccaaacctctggtcctggttttctatgtggccaataacctgtgtgtaaaataccttcctattttatctcactctgctttcttcttatgattactccaatacaactgggtaaagtcccctaaatatatttcttggcttctatctgcatgcctgtgtccatgcaattcctcgctggaaattcccttctctcaacctctatgattttccaaacctctgctattatttaaaacccagcttctagctttaggaagtgtctcagaacactggaaccaacagtaattccttcctgaatgcaaagctttattatccaaactttatcctagcatggaacacatttctcacattgagatcttcatagtgtcattgcttttcgagtgtttacatgttgccgtcagttcttgaggcggtcagtcctgctcacaccacgcccagcagacaagagcacaaggcatttctagttattgatgtggtgatttgtaaacaacgtaaatcaacctttttcacttaccgtttctcggtcgagaagtttggtcactttgacttctcccctgacggggtcaattgtgaacgagcttccttggttgccatctataattgagtagtggatgtggctgttggaaggtccatcggcatcatcggccataacctagaacacaccacactcctgtttaggagacagctaagaagaggcctaaacctattacacaaaatttgtgatattaatagcttagctgtttctttttgttgttgttttttttttgagatggagccttgctctgtcactcaggctggagtgcagtggcacaatctcggctcactgcaagctccgcctcctgggttcacaccattcacctgtctcagcctcccgagtagctgggactacaggcgcccgccaccacgcctggctaatttttttttgtatttttagtagagacagggttagcttagctgttttaacacaattattcataacaaagtcagcaatcagttggcctaacaaaagacactttcaaatctccaaaatatttacaaaggccgctacaaaaactagattgattttactaaaaacttttgcaaagatccagaagatacacagttttcactgtaatggggaaaaaatacacaccgtgatgacagactgctcaagaacggcatcttcactgatgactgtcgtgtaggtgtcttggctgaacacaggggtattatcgttgatatctgttacattaacgttcacagtggcaacgtcgctcagtgaaggcgtgcctccatcagtggcctctactgttaggtaatactcatgagagctctcataatccagattctcaatgataaatacggcccctgaatagaaatcaaaattacttccagcattctgcaatgccaccacattttcccactatgactgaaatagatgaatgcttttgagtacatttagttttcacttcaaaagtttacttaccatttacgtatgtttcctattttcttaattcaacaattaaaaactatgaatctgcccatccctggatctttatttctcttaattttcatgatattcttcatgatatttaaattgcttttccagtcaacaccacctacatccctgcttattataaacatgatgattgtatcatcccttccataccatagctcactcgacttcactctaatttaatcaacaaaataaaaacgtaaaaattctattgtgtctttcggtttcattttttgtctcatctttttaaaatattttccttctcatatttttaaaatggagatttatatccttttaacttctagataaccctttatttacatcctctcatttttaaaaatccctttttaaacaattccttttaacatctttcacatcattctagtcctaaagagccctaaaaataattttattataaatataaattatataaatataaatttatataaattatataaatataaattatataatttatataatttatataaatataaattatataatttatataaatataaattatataatttatataaatataaatttatataatttatataaatataaatttatataatttatataaatataaatttgaatggagcaactttctacactgttttaagacttaggactattttaggccacaggttagcaagatgatgaagcattcacgcagcaggagtcagcagttcctatgccttttgagcttgttggcggtctttccctaactgtgattcaaagtactccaactgttatagacaactagcatgataacgaagtcaacttaatatattatcagaagcccactacagaaactaaaataaaaaagactggaattactatttcacttgggaagttaccatccatgagtctgattacataaggacctctactatcccctattcttatctttactaacttgctataccttacatctcaactaaactaatagaacatgctgctttgattttctattttaagttaatttgcttgtattttataatgaacatgcccaaaatgtattaagtagaactataatctgaagccttccaaacaacattcaatcccactgtaaataactaaaagaaaacttgatttgccttttttagaacatctactgacaacacagggtcacttaatacaaggcaacgtggttaagcaaatctagttttcttggtggaatgaagggtttcctctcagatacatggtaggttacctgttttagaatctatgctgaatttcccatgttcatttccacttattattgagtaggtgatttctgcatttgcttcaatatcccgacttgctgcatacacttgaagaacttcagttccaacaagaatgtcctcagacacggtggcaccatattcacggtactcaaacacaggggggttgtcatttatgtcaagaactgatacaatcacagtgccagtggcagtcagcctccttggcaagccttgatccacagctttcaaagagagggtgtatactgcctggagttctctgtccaaaggtttttctaactgaataattccagataattcgttaatggagaactgcccatcagcagagtcaatcagtgagtataaaatcttccgatttaatcctatgaagacataaaaacatgtcaaaagattttaaataaaaaagtttaacacttttttttttttttgagatggagtctccctctgtcgcccaggctggagtgcagtggcgtgatcttggctcactgcaacctctgtcccccaggttcaagcaattctcctgcctcagcctcccgagtggctggggttacagacacactgtaatttttgtatttttattagagacggggtttctccatgttggccaggctggtcttgaactcctgacctcgtgatccacccgcctcggcctcccaaagtgccaggatcccaggcgtgagccaccgcacccggccaacgcttttttttttttttttaaaaaccaaacaaaatttttttagaagggtaaacgctaatatacattattcgcaaatttgtatgactatgacctttaaaaggtaaacaacttactctgttaaaacaaatgtaaatataatttcatgggaatctggcttcttagactatttcgtataggagccaataatacagtacctaacaaacctttacaaatcacatctgtttatcattgagctttggtgacaaagatctgaaaagcaacacttttgctattcttctgaaacttctcagaatcacagcatgagtatccctaaactgaaaatctgaaatttgaaatgctccaaaatctattaactttatgagtgcagaaccgatgctttaaaaaaaaatgctcattggagcatttcggatttcagatttttggagttgggatactcaactgataagtacataatgcaaatattccaaaatctgaaaaatatccaaaaatccaaaaatacttctagttccaactataataaataaggaatactcaacctgtggtatgactgaagaagttattctctgctatcaaatgctacaaatatacattctatagtccaattttctctaaaaaaattttgaaaggtttgtaaacctatcataaagcatttgcttccattatgttgcaatgaggctaaaagctctctctgtcctcaatggtttattgacaaaataacacatcactgattaattcaatgggatgtgaagatcagttaatattcagtaaccagaattttagagacctcacagcagtaggttcactgggcacaactttggaactttaaatattcattaaaaattaattaattattctaaagatttccttccacaaggaagggctatggaacatgcatgaggtggagtgagtggcacaggctgaatctggggtgtgttttgaaacagaggctcctaggatctcagtgagcagcgtcaggcaagagcattcccgggagatacctgcgtcggcatctgtggcctgcactcttgtcagcagcgttcccggctctgtgttttcaaacacggtgatggcataaggatcggcagagaattcgggggcgttatcgttcacatcttctagcgtgagcacaatactggcttggcagaatcttcctcctccatctgtggccctgacgagaagatgataaacagcttgctcctcacgatcaaggggggttgacgttttcagttcacctacaaacaaaaacaaatggactcacttgtaatttaagacgtgacttgcagttgtacatcttatttcctccccttttgtctttcaattacttagtctgagtattcacagccttcctcttgagaccagtattatcaatgacagattcaacagctgcaagaggcagtgagctccaggtctccaaccctgccaggggctagctctttaagtcctgcaggtctgaggccagggcctctcaccttgtgtataagattgcacaggtgaaacagctaccaaatttaccaaaatttaaaaaatgtttaaattgactcaaaaattagattcacatgttcacaattagttctttaggaagaaaataaaaaggcttaacaggaaacttagttgatcccaattttaccaaaatacaaaaggaaaacaactctattttaaaataaataaaatcccataaatcattttgtttatgaaaattctaaattatgctaagttataaatttatggtcaccaattcaagaaaatatgctatttaaataaaatggataaaaagcagaaagcttgagttatattttaatttctgagggttgttttttttaaacaagtggtataaacgccttctaaattttaaatccttttttcaattaggtgatattcttgctgttttttaaaaaatctcaccttgaattttacgcactaaattgctggtaagatttctaagagatgtcaacttcggagcatcagaatacatttgaaaagggcaaaatgtaatttcaaattttgtgtgtgatctaaaatcacccacatatatgatactgttggaatatacaatttattttgtcccaaactccatcattacctgtgtctggatttagtttgaatttttctgcacctgaacccaataacgtgtaagtaatttcagcgttagagcggatgtctgcgtctgtagcagagatctgcatgatcaattttccaggaaggacgtcttcaggaatagtgtctgaatataaagtctgcaaagagtttaaacaaaaacgttacataaaagcattaacaggcagcacaaacatcaagggaataatggaaaagaaatcattcatctttgaccacagaaaacatgggaaatgactaaagataaaatcccaagagctttgaaaacgatttttctcataaaacataaaacacatgtgaaacaaggaggagccgtggagcagccaccagctccacatccctgaaagagcctggcctgacatttaacctacaaaatgctattatatgttattaagctgatttcatattcaaatccttatgagaaaacgtaagtactaatcaaaaatgtaagtagtgctccgtatttacctaaaaactgcagagaataaatatctgtcgtatcatatctgctcatttccaaatacaggaatttattttttgcaaatgttcctaacataaataactgcagttgagagagaagcaagtttcatgttatgggagaaaacgaagattctcgaaggccacagaagggactctgatgaaggctgaggcccttctactgccctgcgtgatcctggtgccctctctcctcacatctgccctcatgctcaaacacggtgaacacttgtttccagttccaattatttagaaatccatgccataaattaaaacctaagacaaaaagattaagattctgttgattttcttaatctgaactcaactaccagtgaagtactcacggaaaagtactccatgaaaaaggactcaggaaaaagggtatttcataataggatgaatttaaaggatctagtgtcccagtcttattcctgaagatgatagagtattgtactgaaataatatcaaagggctaaaaaacaaccaaagacagttgctgtaagagagagagaatgtcgcaccccttctgaaaatataaagtacaaataagaactggaattaactcctcatccctcagaagttccccttcccctcatgactgaatataagggttcttccatcttaagtctttccctgagaacagccctatcactttccacagccacaagcatctcagactcacagaacctgtggtgggttccaactcctccatcctcttcacaatcacattcctctctacccagccttctcctggcccagcacattcctcctccctgtcactctcagccttcttccctgggcaggtctatttcttcatcacttcactctctgatctgccatcaggcatccatccacgtcctgctaccaagaccgccacctacacagcatcacgggacccaaatggtctgtttcgcatcccaaacatcccagctccactcgccaccctgcctccccaaagtcctcttctccccaacccaggttggcactgcactggtgtcctcctcttccttccagctcagctcccttctccctttggaaatagctctctcttctttttcccttttgttagtatcctctcaaatgaagtcaattttcagctatccagagacaacgccaagtttccacacctttccctaatacccatccaacatctcgccatctctcaatgtctaaaaaacatggtcaactgtatgtctcattactttagcaaactggaattggaactcaacacggaactcctctaaaaccagcccccggctcagactcctctttgccacggccttggtcgctccccctactcatgtagaaagtcgggctcgatggcatgctggctggctgtcacaccagatggtcttcctcggtggtggctttggtcctttcactccttccccacctctgcctttccagggcccccttgcatccactcctccctgtctaaataatgggcacgatgcttccaaactaagcttaagaactcgtctcatgtcatctctaccttaccgatataaaaggctccaaagtccctattttctctaggatcgagttcaaatcccttggaacgaccgccactgcccactgtaatccagttcacccttttccaagactctcagtgcagactccccacttctggcaaactcagtggctactcccacaatccctcctcacactccatggcccctccccacccactcctgacgacccacttactgccccccgaagctgagccagccctttctctgggcagcccttctcaccctctggccccagggaccacccctgctcgagccacatgccctcatctaaccttggagggagcagcccttcctacgtctacttttagttcccactgaatggtgagccgcgcagatgcaggaagcacgctgtccacctctgagcttctccagcgtgcagaagagcagatgcccccaaaacagtgtctcacggcacgtcggcactttgtttcccgtcagatccttcccccaaaacagctgtatccccatattaagagaatcccctcatgaaaaggttacagagcattttcagtgttggatgcaactggagtcctgtccgtaatttagttttctagaatgaggcttttgatttattgagcattcccgcaaatagttctgaagcttttccaagtcttaccccatttaacacctctgcttaatcagtaagtgatcataaaacacatgtgaattacaccacagcgccaaatgatggtcccattgaaagaattaagaaattgaaattcataacacacaaatgtaagggaagagctgcttaccttttcacaaactggactgttgtcatttgcatccagaactttcacttcaactatcgcttttgatgagaaggtgccatcagttgccgtgatagtaagaaggtaattgtcccttttttccctgtctagaggtttcttcacatataccttccattcattctgtatagtttcaacggcaaactgtcctaaaggatcccctcctattaaatcaatggaggaagataataatcaaatttgttgaaaggataaaaataagtaacagaaaaaataaactgtacaaaagatgtataatgttatagtttaaaagaattgagtattaaaagaattaatttggcatatattagccttccaatttacaaaaacaagggcagcattaaaatgcataaacatagcattaagactactaatcatttagcctgcattaaaactatagatgtttttaattatatttattatacactaagtataaggttcaaaagaatgagtcacaaaaatcaaaaacagtctaatgaaacaactggtagctttgctcaggtaacaagcttgaaatgaggctcaacagatgttatttctacgtattattttagatatttttaactaaaatcatcccttaaatccccaatttccatacaatacagatcttatactttatgcttctaaaaatcattttaaattaattaaaccgtttggtatgaattttttttacctgttatgaaatatgtaacttgtctgttgatctcttcagaatcagcatccgtggtacttaagatggcaatcaccccaccttgggggtcatcctcactcacagtccctttatagatctcggccgtgaatcgtggtggactatcgttgacatcggtgacggtaacatccacaatggctgtggaggatagctggatcttttcaccatgatctgatgcaaccactttaatctggtaattgtctctcttttcatggtcaagttcctttaaagttgtaatccagcctgtttccatgttaatggcaaaggattcaatgacttccacactttgtgactgatccaggctatacataacttggccgttggttcctgagtcagcatcagatgccctgatctgaattactctacttccccctggcaggttttcaacaatgaatgcctcatatggactagattcaaagaccgggctgttgtcatttgcatctttcacttggatactaacatctacagaagccaccatctcatggtcatcttgagtgcacctggccagtatggaaaactgataccacttagttgtctcatgatcaagactcttctccaacttcagtctcccgctctgtctgtcaatcacaaaggactcatccctattgctttctggagtattccctttgaccaggctgtaaagaacagtcccactatgttctgctcggatgagatctatctctgttccaataggcacgtcctctgacactgtaaaggtatagaaaggttctgaaaattttggaagctgcatttccggtggaaggattttaacatagacaagaacaacagattcttttgatggagacccattatccacagctctaacaaagaaagtgaagaattcattttccaagccaatgaggctctcctttgtagtgattacgccggacagtttgttaatttccaaattctcttttacactttcagagtctgcttcaatggcataggtgatgtcggcattggagccctcatcggcatcacttgcaagaactttaacgactgaagtccctttagcagcactggacccgatattcacttcgtatttggttgctcgaaattgtggtgcattgtcattgtcatctgtaaggatgacattcacggtgcagaaagcaacttttcctccagcatccttagccattaaacggactgagatcactttctccgccggggtttctcgatcaagtttttccaaagtaaatatctgtcctctctcatttatgtaaaatctgtctttggcaaagtcatttacaatatggtaagtaacgtgaccataaataccagaatccccatccgtagttttcacctccatcaccagggtatgtaggggagcgttttcagctagttccacttcatattcgttctgaaggaaagcaggactgtgcaaattgcctccaattacagttacatgaacctgggtggaacttctaaaaactccatcagacactgacaggttaagactgtaaaatggcttcagggcgtgccggtgcaggtttgagagggtgataatccctgttgcactgtcaatgacaaaatgtttatgatcattgccagacagaatggaatactgcaacttgtctatgtctgaactgtctgcatcataggcttttacacaggtcacgaaatgcccatgaggggcgtgctcgctaattctggcttcataaatctgttgttcaaagagtggtggattatcattgaggtcggtaacgtccaccgtgacaatcacatcactgctcagcgtgggcataccaccatcaactgccctcacaaaaatcgtgtgctgccgggactgctcgtaatccagggttctgagtagtgagatgaggccagtgctgctgtctacatgaaaatgatcatgactcttgctgtgattcccaaacatctggtatgagattcctctatttggttctgaatcagaatcggtggctctaacttgaacaacagacgttccaattacagatgcctcagacagggtcaccgcataagactgctgagcaaacacaggagggttatcattgatgtcgtctactatgatgtccacaaatacttcagcatgagcgcccgtcaaggagtcagttgcgcgtatgctcagcttatatgccgggtgggcctcaaagtccagaggagctatgacattgataactccagtattgaagttaatagtgaactggctgaaagggtctccgtctgtgatgctgtagaacactttcaggccttccgggctgttagcctgcacgtggaccacagggctgtgcacctggatgctctctgcaatctctgcactgtagaaaggtttttcaaacacaggcatggctttattcatgacagtgatcggaacgataacttccgctgaaaaggccgggttccctccatcttttgcaaccactgtaacaagatattctttatttaaggtgtcaagctcaaattgctttttcagtgaaatttcacccaagggtccaatttgaaagtgttcatgatgttccttgaggtagtaatgcacttccccgtttctgccactgtctctgtctacagcagtgacatagcgaatgacatggcccacctcagtgtccactttaacaacggcgtagtagggaaggttgacaaacaccggcgcattatcattttggtcttctacaatgaccttcacgacaacgtgggccactgcagaaggcttatgttcctctgtcacttctacaaccacatcaaacgcctcctgctgctcacgatcgaagggcgtgccagtggttgacagaactcctgaagtgcggcttattttaaatctgcgatctgggttgaggatgtgataaaacaaaggctcattgattggattcccaatagcagtaatgacagctaatgtttcggcctcggtggaattctctttcactaccgcagagtagacatcctgggtaaactttaggtgactttctttgctttctttcacattaattttgacagaggtaaggccggcaaatctgccatcggaagctctaacggttagctcgtagcggcttcttaactgagttgtgttttggacagtgagagcaccagtcttgtagtccatagaaaacttctccccgatgttgccttcggtgatggagtaaatcaactgtgagaatgcacttgaatcagcatctgtagcatttactgtgatgacttttactcctttgtatgttggtaacaaaagagatgcttcatataatggcttggcaaacacaggggggcagtcattaatgtcaattacatgtactgttacattcgctgcatactcagcaaataaacgtggggttcccatgtcatgcacttggacggtaaagtgaaaaatacttgtttcttcatagtccagacttagtactgtatgaatagcaccagtgctagaatcaatagcaaaatatgtgtgtacagatggttcaacaatgtgatatacaagcaaagcatttgagtctttatcagcatcagctgctcgaatcaccagtgggacattcctgtctgttaggaccacgctgttaattgaggctgattcactaatgagtcctgtatattctgcctgcataaaaactggcgcgttgtcattctcatcctgcaagtgaactagaaccgttgtattagtggacaaaccagccatgttagttccttgtattatcaatgtgtaaatgggcaaagtttcaaagtccagggctttctgagtgatgatagttccagaatgtggattaatatcaaaagcatcacctgtatttccatcttttatttcatacaccactgatgattgactatgggctgtaaccatcccaacgaaactcccaatgctgacagtttcactaagttcaacagaatattcttttgatgtaaacttcggagaggcgttgtcagcaattgtgacaaagatacgcacagaagttatttcactcattggtggactgcccttatctgtagcttttaccattaaatcatactccgcttggttacttcgatctaattctttggcagttttaatagagcccaagacaggatcaatcataaaagaatttccaatatttcctggaaggagaggaaaaaatacatgttacagaaaaacacaaggggcagtagtagtagtagttagagaaacagaaacaaagtatccttaaaaattatattctgaaattaagcagaaactcaggggatgtcaatatttgaatggaaccttcaacttgttttatttttatccacctaaaaccaggtatactttacagaattttgtccataaatgatgaaaaacaaaaaacagaagaaacagcactctgctcttagcgaagccaaaactccctctctcggctgcactgggaatgtgtggtggaaagacaaggctatccttccacaaagcagttgagtgagtcactttccaggagtccctcaaaacacttctggaccacatttgtattttcaacggttatgacttacaaattcttaagatatgtattcattacgaaagatttcgattcagtaagaaattgacatcaagcttcaagagacaattgtccatggataaatgtgtgtaacccaccccactttacaggttttgaagattgcaacaacattcccttcttatctttttcaggtcaacttatcctctaggtcagtggttttcccctgggggcaattctgctccctaggagacatctggtaatgcctgcagacatttttggttgtcactacttgtcggaagagggtgctcctggcgtctcgtgggtggagaccaggggtgttgctaagcatcctacaacgcacaggacagccctacacaaccaaaaatatctggttccaaatgtcagcagtgctgaagctgagaggctgctcaaagatagagtgttttacctccttttctttggaccttttcaggctatactgtatgtatctttagctgcaaccacaactccagaatattgtataattttgtatcatcgactgaatcttcaaagaaacaagcagttctctacagcccttttggataaatcagggtggcgttgcaggttctcaggtttaatccatccacgagcccatcctttttctgtttcatgaacaagcacccagaattcaccatccctgtcatagcacagaatttattttccccaaatgaactattatacttacccaaaacaaagctcacttgccacttaactgctttctcagattcttgctctaggtttgccacgagtgtggcatttcacagaccagaactgctcagtgtgagctgcacaccagggattcaccaagcactttgttctccacatcattaacaggaaacacttcctctacagtcttcacttccttcctttcatacattttccaaaaatccacggccattttttagagaccagatccagcctgcttttcattaagtcttactggctctgcatccgagccccaaggcagtgcctcagtctgcaacagggtggaggcccagggtttctctaggccctgacgctctgagctgaaccctggccgagaactgggtcctgctgcctctgccaggcttttgagacactaatttccggcctgtctgtacttatgagtcagtgatcccaggtccttcctgattgcatttttggccgtcgtcagaacgccaagatccttttctcatcccacctgtacatcaccctcactgtctaaaattgtgactgactgcctggcctgacacaggagactggggcagccatggtgactctcttcatccctgcccctcagacttccctatgtctgtactcaccagctgacctaccatattttatattcattcttctatatccacttctctcttattgtacaggataatcttatcttgccgatgaagcttcaaatatgcaaggcctcatgtggaggaacgaagagactatctgctgtggaggaggctggtgctgctagaacacactgctttctgcaaaacttgctccctgccctccagccaagtgggcattctctttgtcctcaatcaggagagcacactcatctcagagccccagtgtctgatgcatcctctcctggaagagtctcctcccgctattcttactgtttctgtctcatcgccctgtgttttctttacagcatggattacaaccttgctctttatcggccatgcaagattcagaaacatcctctattatctggggcatcatgactctggtgaacacagcttggagcatgtcactgataacaaggttaaacaggaacccagctcgtgatgggatacatgaatcccacatccatatagattaaggcagaaatcatcagatttgcaggtgggaaagcagcatcgtgtttatgtgaagaaacaatgagggctgctgagtggtagaaagtgcccctgcctggcctaacaacaggttcattcacagacactgagatgcactggtgctgttgaacgacttcctaaggtggcagaaaaggtctgtacgaggctgggggcttattcactgactttagctacaatatgagtgatttttaaacaactttaaattgttccctgtatgggaacagggcaattatctagacaaacaggctaatttttactcttaagctattaagtatattacacagaactgtgaaggggagtctgtttcttcccctgtagacacacactggatgttcagctggggccccactgactggcagagtggcaccctccgttgactctcaaggcaattacttaagtttggggaggaaaaccaattctaatcaataagtatatttatttatggagtatcttctatttccaggtattaaaatggtttagaagtagtgctctaataatctacttttttaaaaagatgtaagaagaaaacacacagaccagagtatggcactgacatgtctccagcatataactcaatggttactgaaaatatctcttaattaactcctttttccctgaatactcctaatcagaccaaaccttttactcaattaattgctgctaattaaacatgcagtgttacgtactgaatttgtaactagtctttttgaactttaaatgtaatctgacacaaattagaagcagataattatgaataaacttaaatgaaaggcatttgtatgaacattttatagttcgtactattccaacagatgtccacctccatctccaacacatgcacacaccccttccacaaaattctactgcattttaatggtagtggtctcctacaaagtaactgctgagcataatttttatattaccaaaactataaaaatagcatcttaaaagtcctaattctatgccagaataggccattggtattatctattcatggaggagggagttccattctctgaataccagattcctaatcctgtcagtcattagaagcattcaaagaatgcacatgcttctactcagacaccaacaatcatattttaaccacccagttgttgacaattatgtgaaagctaaggggaagtttaacattttctcctacataaacccagtcagtttgtctatgacagaattactttattgaagtacgcaggcatgcacaaatggaatgcactgtttttctaactgcaaatttctcaaccagtggaaaaaaacttcatctttactcaaggcactaactacactacattttaacactgcaatcacaggcagtgtatgagatcttatttgtgactaatgaactcgatttggttgttttaagggaaacaaatgaaatttcaaatatgttaaataaacatagtttaaccacctagaacacatcagtaagttttttaaaattactctccatttcctcaaatttttattacatgatctataattaatctatacctgtaccaattctaatgcctaggagagacaatttctaaatatgtagagctacagacttaaaaaagaaaacaagttaaatggaatattttaattctctaaactcattatgaagaagactgaaagggactatattccttgtactaacaatggcactgaagaaaacagaaaactgtaaactgtcttcccaacatttcatcactttcagaggatctggcatgagcaggaacatcctaaagcaacgtgacttctgattgtacagactgtatgctctaaagcagagccctgtttctatcggggtggaacttttacaagacacgcattgtggacccaatggcaacgcctacgtaccatgcccaggaggaacactcccaacatggcacctggcacataaagtgagcttcaccagcccacagaatgaatgaatgaatgagggaccaacatggcacctggcacataaagtgagcttcatcagcctacagaatgaatgaatgaatgaatgagggaccaacatggcacctggcacataaagcgagcttcatcagcctacagaatgaatgaatgaatgaatgagggaccaacatggcacctggcacataaagcgagcttcatcagcctacagaatgaatgaatgaatgaatgagggaccaacatggcacctcgcacataaactgagcttcatcagcctacagaatgaatgaatgaatgaatgagggaccaacatggcacctggcacataaagtgagcttcatcagcctacagaatgaatgaatgaatgaatgagggaccaacatggcacctggcacataaagtgagcttcatcagcctacagaatgaatgaatgaatgaatgagggaccaacatggcacctggcacataaagcgagcttcatcagcctacagaatgaatgaatgaatgaatgagggaccaacatggcacctcgcacataaactgagcttcatcagcctacagaatgaatgaatgaatgaatgagggaccaacatggcacctggcacataaagtgagcttcaccagcccacagaatgaatgcatgaatgaatgaatgagggaccaacatggcacctggcacataaagtgagcttcaccagcccacagaatgaatgaatgaatgaatgagggaccaacatggcacctcgcacataaagtgagcttcatcagcccacagaatgaatgaatgaatgaatgagggaccaacatggcacctgacacataaagtgagcttcaccagcccacagaatgaatgaatgaatgaatgaatgagggaccaacatggcacctggcacataaagtgagcttcaccagcccacagaatgaatgaatgaatgaatgaatgagggaccaacatggcacctggcacataaagtgagcttcaccagcccacagaatgaatgaatgaatgaatgaatgagggaccaacatggcacctggcacataaagcgagcttcatcagcccacagaatgaatgaatgaatgaatgaatgagggaccaacatggcacctgacacataaagtgagcttcaccagcccacagaatgaatgaatgaatgaatgaatgaatgagggaccaacatggcacctggcacataaagtgagcttcaccagcccacagaatgaatgaatgaatgaatgaatgagggaccaacatggcacctggcacataaagtgagcttcaccagcccacagaatgaatgaatgaatgaatgaatgagggaccaacatggcacctggcacataaagcgagcttcatcagccgacagaatgaatgaatgagtgaccaacatggcacctgacacataaaacgagcttcatcagcccacagaatgaatgaatgaatgagggaatggcagtggaaaacagaccaaaaacatcctgctatgccaggactgcttcctggtggtcccccttgttatcccgactctggatctcttggcctctgggtcccggaaccgtccaggaccgcagctccagctgttttttttgctgcccttgctgcctcaagccccaccccagcaggccccagctctggggtctagtcctcaacccaattccatgagggaaatccacctgttaaaggcgagtggcaaaaatccaggtaaatgtggaaggggtgggaggggcacgacacctctttctgaggtttcagccaattacaatgagatgagtcaacactgttatggagcttcctgctctgctcaagagaaaatactctctgacaaaaaagtgaaacgttaaattactaggcaagcagcttcctaagtgtgtttaatttaaccaatgttacagaagaaactgtggttaaaataatttcagaaatactgaattggtcaaataaagtttcctctactacgtggcttctcagagccttgaactgggctaatattgtgaatcccccagaacttcccccaaactctctgatgggctaaaagttaaaaaaaaaaaaattcctttctcctaacatgtaaaattgtatctagagatcaatttaagccatttttgcagatacatagaaatgcttcaatacccagaactgattttggaaaagtagaaacagacttttaacaactgcaaatttaaaatgccactgaaggctccaaaagtacctgactcgatcgagtacagcacttcagcatttttccctttgtccttgtccagagccgtcacctgcaacacaactgagccaacggctgccgattcataaacccgccctttgtaggaggaagcggtgaaccacggggcgtggtcattcgtgtcgctgacattgaccacaatccttgcaaagttgcgttttacaggcacatcttgatctcgtacctaaaaagaattgacacattatcaatcccattggtgctttccttataactaattaaaaatcacgctcgaacacacaaaggcctcaggaccaaatggtgggaggagagcgggtagagcgcctaccatgaccgtgagggtgtgctggtgaacagcttcatgatccagtttctcagaagtatagagagagccggttgcaggatcaagacgaaatttcttgagactcagtggatctctactgctctgcagagtgtagattagtttgtttttctcatcctgatccacagcactgatttgcaaaatttctgtttctggcgctgtatcttcaggaataacaacttcatactttgatgtagaaaactgaggacgatggtcatttgtgtctattactttgatgaatacctgtaatggatgacaaaatgactcatacaatatttccaattatgaatgttttaatacttaaagaaccatgaacgaaagtcatgtatattgaaacgatactgtggcaaaataaaatacgagaaaggcaacaaaaacctagaatcatacatttcttaaaacatttctcattggtatattacttatctaaatatgagtaagataatgatgacctttctgcattcttataactaactctgggacaaaatatgtattgattttcacacttgccacgtctttacgtgggcttaacttctcttacgcctccacagagaaggtatctgtaggtcactcatgtacggataacaatttaccaggatttatagaagactaatttcttaaatcagatttgtatctgcaactaccaacccactgaggtaagacagatgattacactatccaaatttctcattctcatctttgacatcccaagcccctgatcataggtttttttaatacgtaaaaagaaaaaataagaaatgtgtttagaaatcactgtatttctgtgatcataaacctacatctatgtagtaaatatgtttactccctaaaaccaatttagtcaatagattgaaaaaataaactctcttaactatgtctacataaagtaaaaacctttagaggaaaaaagcaaatgttaagaaacttggtactaagctaaattagaaacaaacaaaactttgacagtaagaggattaatttccataatgaaaagacgtatggatttggcacagcggaaatcactgccaattataaaacatgctttagagtttaagaagaagaaaactgcgcttcgtgggggcatatggaacaaagggatctgctggtccaagcagcacagggggccagggtcccaggcagagcggtcaaccacatggtgcaggccatgaacagaggccttccttccatgagggctacatcagtgttctcacagaagaccaaaatatcaaggatgttttagttaaataaaacgtaacattacattttgtatgaattccagatgcatccaccaaaccacggaaaggttgcatgtgaaagctatgtaaacctttaaaactacagatgcctcacttttacaggtcaatgatgatccagaagggatggctataaaggcaattaccatagattagattacatattcatttccactataaatttaaaaattacttttcccatgtagtgggtactgagcagagaagtttaatcctgctccaagctcaagcattattaagtagaaagaactggaagtcaaagcaattcaattgaaacacacggattgtgcgtttccatgcccaatgcttgcctgggtgtgaaatcagcatgcaatggtctctgccctcatagagccaccaggcttaccaggcaatgttctgcacatgcacagcctaaccatgtctcatatattatcatgtaaagtttttaagagtccagagactggctgagatattcagaaagctcttaaggagataatgctttcttgggtacatttttggttggcaggtgagtaagtatgaggaagggctgcgtcaacgacatgaaggcaagcagtgggacggaacatcctgcctttcagaggctggagaggacttggaactcaggggtgatacagtaaaggagcaagaagaaggcagagtcaaatacgcagagcctcgactccagaactgatgtgggaggactacacagctccttttggtcagaagaaactcgcttccaacatgagtggcagggatgaagaatggcgactggaaggtgaattgagtgttggtgggacaagagcccaaaccagtgctgatgtgcaacaagactatggctttctgcgtgcttactgggtgacaggctctcagaacgtgaagaacaagcaccctgcgggtcacctcatcaaccttcctaagacctccaaaaggacgattatcaccacccccactttgtagatgagaacatggacacacagagagttacagctatttgcccatggaaaggagtacaagaggtggagccgggattcaaaccaagtgatctgctccagaggccacgatgctgatgctcgagagaaagttaaagaagatatgaaagcaaagttgtttgaatgaaagaaaaaaaaggtaactggatttggtaagttacctggagatacaagataaagccaagtgactggaatcaatggcggtcagcatcctaagccacacacgcaggacaggaaagccagagaagagctgtttccgcagggcactggcagttctcccactgtcctgccgcctacctctgctggaggctgcccgcttgactcaccaacggctcacctaaaccttctcaaatcggcatctgctgcccctgacctggatacacaatggctgctctgttgacttctgagtgttacttccaagccccaatccatccccgaggtatcctagtgtctcacctcccagctgacccctctgctcttcaatccatccccgcagtatcctagtgtctcatctcccagctgatccctctgctcttcaatccatccccgcggtatcctagtgtctcactgcccagctgactcctctgctcttcaatccatccccgcggtatcctagtgtctcactgcccagctgactgctctgctcttcaatccatccccgcggtatcctagtgtctcaccgtccaggtgactcctctgctcttcaatccatccccatggtatcgtagtgtctcgcctcccagctgattcctgtgctcttcaatcaatccccgcggtatgctagtgtctcactgcccagctgatccctctgctcttcaatccatccctgcagtaccctagtgtctcacctcccagctgactcctgtgctcttcaacccattcctgcggtatcctagtctctcgccgcccagctgactcctctgctcttcaatccatccccgcggtatcctagtgtctcactgcccaggtgactcctctgcttttcaatccatccccacagtatcctagtgtctcgccgcccagctgatccctctgcttttcaatccatccccgctgtatcctggtgcctctcactgtccagctgattcctgtgctcttctccaggtggcagctgctgcacccccctcccgcccccacccaaattcatatttccaggttctcagctaaagaggaaaaataatctaaacacaaatcattccctttgtcccacaccttaacaggtcaacctgggctactgttctcttatagtccgactgcctttctctgccagcgattaggatagcatctacagcctatgacaatggcccaaaaataagttacagaagtataaaggaagcaatgaaatttaagatattttgtgtttccaagaaagaaaactagaatacacttcctgggttttatagggattttagttggtgcacgtgatatttcatgctaaacttttaactgcactaattaaaaatataattattgggaaagaggtgcactgttaattattcatagacgtagggtctttagtaatgagaatgcttggcaaagagggacagctccactgtttatgaagctccttttgttagatttctgggtagtcgattctgtgaattggtctacagttataccccttaaatccttctctcagaattatcctattagatttattacaatttatgatgtttttattctcatttttgtgctctaaaattttacaagggcttatgtttaaagagagaaaatcaatagattttgcttgtctctagaatgagaacagctaccaactaaattgaaattttgacaccatactagaacttttacaagacaatctcaaaatgaccccaaaagcatataacatacatgtatcaattttatatacactaaaaatcacaagcatttggagaaagaaatatttttgtaaatggctttaaattatctacccatttattaatcgaaaagacatcaccgactataatttttatcttttaatgcagctaaatgagttagcagatgatctgtcttgcttagtacttaaaacaggataatctaacgctagaaaatttcaaactcagatgcaccttgttctctgacatttaacttctttctttttcatttaggccacagtagattataaacaagcctttagcttctgccatcccagtgtaagctccaagagggcaagattgttgcctcttctgtttcctactattcaccttccagaatggtgcctggcatgtaacaagtgttcaacaaatacttggtaaataaatgagtgaatgacactctgcttgctcctgaaacctcaggatgcttcttctatctaggaatattccttctgtacactccaaacggcccacactgagaaccaaagaaaagtaataagaaagaacagaatttaaatttcacttacaggattttaacacttaagtttgaaatccccataatctggccatctcaattaccagataggaacaaataaaggtggtaaaggaattattagaacaattttattagttattttatatagccaggaggaatccaaaaaaaagtgatttagaagattaatcactttaaccagttttactgaaaatgatttaaacaattcattctcaacagtgatgtacttgatgttaacatagtttaaaatgagtgtaaaattcgaagattttgatggtataacgttggtttggtttggtttttgaagtcttctctcaaaattctcaaaactgcttaattatatgcaaaacccaaattgggatatggaattaattttctttccctaaataaaaattcttagtgtgcatgtgtgtaaacttctgattttagaccctcacagggcagaatccaccgctcatattgcccgtggacccctaagtcagaacgttatctccatcctcctctgacaagtgtgtcattagtaattcacttacctgagtgaggatagtggtggttccatctgtagcctcgactgtgaggttgtagtttgacttctgttctgcatcaagaggtttggcaacaatgatggttccagttcccttgtccacatcgaagtgactgtcgtagttgccacctaatttggggaaaaaaaagtaaaaacaggtcacaggataacactctgtagtttattctgtggctttctcatacttaatggcactgaaaaatcttctaatatactagcaaagagcttccaaggaggagcattttgaaagaaaagagtggccaattagaaagacaatgcttgttaaggcaaagtgaaccctaattgtccaggaagcaactaactgaaagaaagcaagaaagcaactctgaaaacaaagacattgctaatattgccaatgagttactttcaatttgctttttcaggggttctgaattcctcttcaatttgtatctcagtagataccatcactgggccatttaaaagcttacttactaacaaaactttctgatactttgagcaaattgacctaataaaatagctattaaaaatcaatgttaactctaaaaaaaatagcggtcgttaactttaattagtcctggctactataaactatttgaaaagaattttttttctcatttttgacaaacacaaagcctaatgaaacaaaagtttctatcctattaatattatccaaatatttttgataaaactctcttttcaaatccatcgacctagatataaaatgaaatgggatgaaaatagaggtttaatgtcatgatgaaattctactactaaatctaaccaagaaacaaaacaacacacacgacgtcttaagagaaacctaaaaccacggagctaggtgagcattacgtggcaacacgctggcgagtgggatgggtgaccatgcgcacactatgaaaaaaaaaacagcgatggaagatagtcactggaaataaaaaagtaaaaaaaaacaaaaacaaaacaaggcttttattttagatctcataatctgaggcaaattatgtgatctcagcagataccttctgctgtacaggtcgggtcacaagtcatctgaaagatgtaaaaaacttctctagcaagcgtgtctcctggcacagccaaaaagaagcaagcgcgcatggaaagcaagcacagaataaaagcaatcaatcaaaccaggtccaagcacagcaaggttacacagcgaggtcaggtactgcacagcagcagcctgttgatctggaaatgtgataaaagttaacagaaagcaaacaaacggttttgagcatcgttaactacgaaaatagtctctttttccccttcccttgaaagtatgctgtaagggtttcacaggtgctgatgacatcaatttcacacaatcaccaaattggtaaaacagccaaagcatttagcatgaaagttccaaaggtaaggcctggcctggcctgacatgcccagtggtctgggtccatcagctgcaacttttgggggcttcgggttagcatgactaaggggcagaaggggaaaaatggacataaagtcccccccagagagatgaatcgcaacagagactcttgttcttaaatacccttgtaactaaaatgtgaggaaacaataaaaaaaaatctaagatgcaaactctaatgtgaaatttaaaaaatacgttgaatagggtattacattcaatgtcttatctaaactacatgacaaataagaagaagaaatggctttagcaagtaaactttactggaggatgaaataatctaatgaatcctcctacctgttgaaaatgaggtaatataaaactaaaaacccatagctggtaccataactttgtaccataagctggtatgaatcaaaatttgtaagcttattccctattaaatattgacatgtgacagtcacacaggcatagttactttaaatgttccaatcatattcactaaaaataacaatgtgccataggttatgcatcaataaaaataacaatgtgccataggttatgcatcaataaataaacagtaagaagctgtgcttctggaccaaaacattcaaggcttttgtctgtaactctttgacaaacttttacaaaattttatttttatatcaataacttggtagaatagagcacctattttaagcaagtttaacatatgctatatattgtgaaaaattttgcaatcaaaatattatagttgaaagcaaattctccacctgtcgatcttattcccaattttaaatcctgacttgtgcccaaaactcatcaaaccgtatgcaggttctcctcagtgtaacccatacggacaacgaaaatgagggggaatgcttaccagtgatgtcaaaccaaaggggtatgccaggaggctccacagatattactccaatcatgtgagcaacggggtcactttccatcacagtaaaggtaaaaaatgattcttcaaatgaaatgggctccagggacggtttgggcttggagatccattcaatatggagtctggtggttgatgacttttgagggcgaccattgtcaactgccttaatctacaacatttgggcagaggggattaaaaacagcaaatcaggagttacaacccagaaatgaatgaagcacagactggtttggtcttaaactgagccaatttcaaacatttcacatttgtattctgtgtatggaatgcctgacagaagaacaatgatttcatgaccacattcaacataaacaataagcaccctgattctcaaacgttatccggcattgcctaatggggccagcaggtcacaaacacttcagccgtttacaaaatagaaataaagttactaaagaaaaaatacaaaataaggtttatagtcacaacatatgaaaaattacagtactacaatcttaactcactgaaagaatatcatattctccagctgctgaaaacctcttggacgaaaccactccagttttcggttcgatgaaaaatttgccatgctcattcccgtcttcgatgctgtaggagatttctgcattggggccctcatccttgtcggtggctatgacgtgatagagcggctcccgtctggcatttctttctcggtctggcttttcccgctcagggagtctgattttgtagaacttttgcagaaactgaggtttgttgtcattttcatcaaggattttcacaatgactcttgcaatggttgatttggggggactaccattgtctgtcacagtaacctgtttttttaaagttaacagattaacatgttaagatatactatataaaaagtgagcatcttcttcctcatgctactccgcatgtgtgtaaagctctgcattttgcagggcacgatgacaacatacacagcagatcttcattccaacaacagggctgtaaggaggtgaggcagcacctcccatctctacagggagagagtcagggggccgggcatggctaagaaagaaacagctgcacccctgcgcgccttcctgaccacgcaggctctcttctcgcattagtttaagtggaaagtgaacctcacccaaatgttaagctaccaaaaacttaatacctttaggccatggaagagatacgtgaagattctgctttacacatttaaagagtcttcttaaaaacaacacactctacatacttaaaaacaaaatttccatatatcatgttaaaaatgttaaacttcatcagtaaaatatgctaaattgtcattttaaagtatgtgttaaataaatagtacaccttttaataccagtaatcaccattttattttggctgttttcctctacagatttttataggagtggacctaaacatttaaatttaagaccaactcattaaataagattttcggtaaaataactttcattttaagtaaactatccatatattcttatattctatttaggaaaaaatatcagagagtcttgaggactgcactgatgactgtttctatgtccctaagagaccatttcacccttaaatcaaatgttcacgtttacgtcaatgggcacattaaatataacgacattagtaatgcttattctcccctatccacacccctaccttcttcccaactgaattaccaaaacactaaaaacggtcaaggagactgaagtctggcagttgtaaaccctgtttattaaagtgtgactatatcccgatggtgcctgtcaaaagtatttaagtagttgctttatattatttaccttcctaagctttttcaaaataaaacattactattttaattttaaactctcgaaacatttccttttcatcagtttgcatatgagctttagaaaaacaagaaagagaaatacaagcaagcactatgttttttagtattcatcaccaaattgttcctaactttgggttcaagaaccagtagctagtcacagctttcaacatgtaatggagacactatctttaagacagccaaatcaatgccagcactggctctcaaatataccaccccaaaaggaccctactgaaaaatacactaattatgtatgttgaagggaaaatttatttcccatccatgtccaaatatgactttcaaagtgctatatatctggtatctgcttccacctagcctttgatattcacggagaaaagaggactctggagtgacgtatgcaattaatgtgaaatttgaaaggactggagcaaaatgtcagtgtaactactgctctcctatcttcccatctgtttatctttgtcagtgactgcatttgccccttctgtcaatccttgtagtgacagaatgaaaattcaaaactttgctctatcataaagaaaatgaattcaagcgaactttacaccctatgaactaaaaactcagatgtaatacatgaagcagctcctaatggggaaagcactgtggctgtgaaaccaccttttccagagggtattcccagttcccaatgcacacacacacacacacacacacacacacatacactgcacaactataaaaactaagtatttactgacaacgttaagaaaatttgaccaaggataaaatgaaattaagcaggcagcattataaacagcaatattaaaagaaattttcaaaagttacagtttagaattttgtcacttatactgttagagtggaagaagagcactgataactcaattaaacaaaggcaggtggccttttccaaggctggctccgataatgaacaccagtcttccacacgggacagagagatgtctctacgcccctctctgcggtctgcctgtctctcagccgcttcctgacgacacggcccagagatctcatcaacctgatgtccatgttacgctccaccttccctctccaaattactcgcggcctttttctgcaatgtatttactattagccaaaaaccaggtgaccaatacatgataacaagctgtgggttttctaaggactaaaaggcattgtaaattatccatgagaatgagaagccttattagaactttctagaagagcacatctgagacttcaatctacttttacttttgaggtatttaagaagcacaaactaagtaattcatagtttaaaacgcaaaaataatgcaactgtttaagagcaaaaaaatgaatctggaaacaaattacctctagttaaaaaggttgaaacagatctataaataccaacataaatatatctcaaaaacataatagtaaggggaaaaaaagatgtatacagaaaaatatcacttatgtaaatgcaaatgaattccacatgacactgtttatagatctgttcgccccctgtgtgtgcgcaagcataaaatacaaagatctgaatccggcccatgacagtggctgtgtattctgggaatggtattgagggataaaggggacaagagctatattcattaacaatttccttatattcctttttcctaacaaccagtaaataatattaatacaacaaaatattaatagctaagaatactggttaatgggaacaagattgttctttcccatgatacttgtaactacgaatctttaagtattaaagataaaaaaaaaacttacctctaatatgtgttcatcttgctgttctcggtctagcttccttgacgtagttgtgatgagacctgtaaaatgataacagttcattaatcctcacaaaataaggtcaattacaaaatactgcaattaaaatcacactcttggccaggtgcggtagctcatgccttaatcccagcactttgggaggcccaggggggtggattacttaaggtcaggagttggaggccagcctggccaacatgatgaaaccctgtatctacaaaaagttagccaggcatggtggcgcgtgactgtaatcccagctaattgggaggctgaggcaggagaattgcttgaacctgggaggtggaggttgcagagatcacaccaatgctctccagcctgggcaacaaagtgagactccatctcaaaaatacaataaaaaacaaaaccatactcttgtaaaagtctgagcaaatttcttctcaagaaaaaaagaagaaagaaatttcttactaaagaaatttaatttccaggtacggttattttgtctacaaacaacaacatactttatactttctcactttaatgactcatattggataaatgacaaatagtaagaaagtggaaaaactcaaatcagttacattttctatttgttagtggtttcaatatacattttgtcagaaaagattttttaaaagtgagatgaagttatccaggatttcaatctcatccatctcctttaactgctcaagagataactgagagttgacagaaatgacttctataactatattaataaggactattgaaaataaagtgttaactctaatttattacctttgaattatccactctcataaataaagaactgttataaaaagtaatgtaattttccaggtaatcttgctcatttaatttcccataaaagaaaattaatgatcctcaaattctgtattctagaaaacaaatttcctatcaaactagaatatctatgagttttgacctctcttgagaactttaataactgctcaactgtctgcatattttggaactagaaggcaattacaatttataaaatgtattcttatgcttcaccaaaaccacaaacaaaactcccctaagcactaaaatgtcgtccccaatctgtgttgatggtgaacaggtgcatgcaggatgatctgcacctccgaccttaaaaccaggtggagcctgtgtggcaggacaatcaccagggctgaacgttctcctcccagtgctgcggcttttttctcatatggaaataccttaaataattcacatttaagaatagacattattaatctaatttattttctcccataatctttactaatttcacagaactatcacttaagggatattcaacatgtttctctgcagcaataagtgaaaggcttgtgttttcacttaattcaaaggtttttttccttaagtagttactaagaatctaaatcaacattattttcctcacaattcaacgaaacagtgttctctttttaacaagggcaacagaaggctatatcatacctccacactggggttttcccagatcataggtatagattaaaaggtgctaaagggaaatgcttcacagtgcttacgggtgtaaaaatgacgcttgaatgtggcacaagcttaattttcattagtcaaaaaccttttaagttaatctctttttttccccaatcaaaaatgtaccatcctctcctaactgtggttgtaaatagttcaggaacgacaaggagccccttgattagtcccacatctaattattgtaatgtgtccaccaagaagttgtgattgatggtaacatcacgtggaatagcagcttgacacgttcccaggaaaacagtattcttctgcagagcacttaatcactcaccaacagcactgcgcaaatacttatgagcaaatacaactccccacttcacgatttacttagagcacacaagaaggctaaggaaagctgtacctgtgtccatactaccaattccacataaaaaggctgggcatggtggctcacacctgtaatcccagcactttgggaggctgaggcaggcggatcacctgagctcagaggttcgagaccagcctggccaacatggcgaaaccctgtctctaccaaaaatacaaaaagttagctgacatggtggcacacacctgtaatcccagctactcaggaggctgaggcagaagaaaagcttgaacctgggaagaggaggccacagtgagccgagattgcgccacagcactccagcctgggcgacagagcaaaactctgtcaaaaaaaaaaaaacaaaatccacataaagccaaaaggctacctgaccacctccttcctgggtctgaaattatttgcatgttctatactcctcaaattaattctcctccgttaactcagatggagctttaatttcatcccaatgcaatgaatggtaatattagcccctttctttccacttcagcctgagtcactgcctcacccttcagtttaaactgaagcgggtttaaacttttaaactcactgcagggcctggcgtgggttcctgctgctgcattctccaagttctaatatttcttctatcataatattactccacagtattaaagcccctcatttaaaaattagtcttcttttctgtactggaaaactcacgaggacagtggctgtctttcttgcatagcttgctcacatagctatctctccgtcatcctcaagaaacacttaaacgtgtgaacatgtgaatttcttaaaactatgaatgagcagaattaaaaatatgtgctagagtgagagagataaactactgtaaacctgaaaatgatacaaatccacagcccataagtgagccaacagagaatgcgttagtacatatttataggcagcgtgtgccaggtgctgcgatgggtggctaggtgctgcaatgggtggctacgtgctgcgatgggtggctaggggctggcggcaccctgcgggtatttagaagcacagacccgaggcgcagggaagaagctgtgggcatacagacaggtgtgactcagaccacacccacagaagtgagcataatactaaagagaacagtgggcctataaaaacggtagagaaaatagcgggccgatcttcaacctaggaagcaatctgctggaagagaagcttcgtgtcccagaagccaaaggcagacgattttaaggaggacgtactttggaggagcctggaagaaaagagaaagtgaggcaggaagtagaccaggagaagtattacttttacgaagacgagattgtctcacatgtaactgtaaactagagagaagacgaagatgtagacttccactaacaaatacagtcaccactagcctcctgagaccagtggaatttaaattaattaaaattcagtaaagtttacacttcagtttctcaatcacactaagccaaatttccagggtacggcagcccccaggggccggtgacgacagcatggagcaaggcagatggagaacgcgctccccacggcaggaagctctgctggacggcaccggtctactcaggaggcataattcacaaatcaagatcctgcaagaaaccctgcagggtgggtttacttttctgcggagaacacgtaagatatttcagactgacaaaaacaaacaaataacaacaacaaactttctttctaaattcacaacacttagcaaaaagaatcttagcaaggctgccgtagtgcttttccctaatgccatctccagagagaggccgtgcatgagtgtcctatgggggtggcaccaggtgatgcaccccctctgcgaaaaattacagtaaaattagggcttcctgtgggattttcatacaaaatgaaaacagaatttcctaatgatgtaatttaatactaggcattctgggtgtcttttcgaggtgcgctttaccttacagcaatcaaccacactgagtgcctaacaccccggggaacgctacccgaaccccctgcactctggccatacaagacaatctaccgagtgtgttctgtgttcacactcattcacgcctctgtgagcatcactcctgctcctcatcccccccccacccccacccacttgaaacatcgacttcaaacataattctaaagtacaactgctccatatacccactacatgttattaacctagtaggtagtaagtgtcctagtaagtatgtccacttctttcattttcgacatctgtgctcatctgcaatattttttgccaaatcccagaaagatatatacttaaaggaaactgtacagaacttcagaactagacagaaacctttaagattatcaagttgagctgcctgaaccaaagagaagttaaaattttccaaggccactagtaagtcattaacaaagccaggagtaggatttcgttctcttgaggctcagatgagcgtttttttctccctatcacacctgactgcgtaatttgctgtattatagtatttcaacactccatgaactctgaactgtgactttcataaactgtaacgaaaaaaccaggaatgactcatcattagtcatttaatagatccaaaaaagcaagttaggagataaaagaggcaaaagcagaaaaacgtatatgcaactgttttctttttgtaactttgtgtttcatcttcctcttctgccaagcactgataattaaaaatagaaaggaagaaaaactagaaatttttctttccttggtccagaaaaacactgcattctatataataaaactatgataaatgtaggtgggctgagacagcagacacagtatattctcaccaatgagcagttaccagttcaccccagaaatgtatgcacaatgcagtaacaaagtttatggcacttgaggaacatcattaaaaaccactcatggcctttcaacgccacttagacatttagagatgagttcatttagaacagagagaatgtcagatcagctatgtttcaatataaaattgtgctctttgacatttcttataaatcagtaacaaaaccatctccaaacttctcaaaattcaagagataaagtagacttcgcgaagcagatagacgtaaaagtgaacatcaaaggactagtaggtgaagacagtcatgtgacatggtccacacagctggagcgatgaatgcattcagtcaactgtgttgtactgtccactcagaaagtggagataagacagtcttgtttgcaagaaaccaggatgaaggctagaagttggcaaagactactttacatgtgagaaacagtaagacaggatagattgtagggcactgacagaaaacacagtgcaggagctacacacagaaaacaggaagcaggaggaaggctcttgccagcaactctgtgttccagaaaagtgtggacttggttggaagagaagacacgtggtctagtcattcgtgctgctccaccattgcctgacatgtgagtgaggccaccgaggaccagctggccaccagccaagcctgcacaagagtggaagaagcacccggcagaaccctaaattatgagttatttcaagggcggaagaactgcccagcagaaccctaaactaaattatgacagctatttcaagccactcaattttgacagtttgttagccaaggtattatgctttaatagatacttcattacatatatatatatatatatatatatatatatatatatatatatatatatatatatatgcctgtaaaaaactgagatatatccacatatgtatatgtgtatatcttcacatatgatgtgtaaatatgtgaagatatctccatttttacaggcttagagagattaagttgcttactcaacgtcatttagcaaagtattgaagttgggggttcaataaatctagtaagtctacattaaaagtgaaagaaaccagggagggactgaagactgtggttctgtaaaaaataaatttcaacatcagcacagtggataaaaatggatggcataatcccagcactctgggaggccaaggcaggtgaatcacttgaggctaggagttcgagaccagcttggtcaacatggagaaaccccatctctactaaaaattcaaaaattagctgggtgtggtggcgtgcacctgtaatcccagctacttgggaggctaaggcatgagactcacttggacctgggaagccgaggttgcagtgagctgagggcggaccactgcaattgagcttaggttacagagtgagactgtctcacaaaaaaaaaaaaaaaaaatatatacacacacacacacacacacacacacacacacacacatgaaagatggcagctagaaaaggaaaaaaataggatttctgaataggattcaggtccaactgcaacaagagagcaagcacttgcaatctgtagtacgagtcatcgatgaccccacactgaaagacagggtcctggctctaaaggaaggaatctctgcagccctatgttcacctcacccggcaggaaatttacttggaacacttttcaattactctactagagaataagcacaggaagggaaaaagatcaaggaaaaaaggtaaaaatctggtcacccgataccttccttttactctgattattttcctctaccccctgcaatgattttggcctttccgcccttttattttacaataattcatgaaccacagccatacacgttctagaaaagcactgtccaacagaaatttctgtgatgatttgtgtgttctataatttgcactgtccaatatggtagcacctggccacatgtggccactatgcacttgaaacagagctaatgtcaccatagaactgaattttaaatttaaataatttaaatttaaatagtcaccaattatgtctgatcctttatagcatctccaatttcaaatgctgcctgtcaaaactaaaaactttaacatctgcaatattcaaaatccttttctgtggttaaaatttgaagcaaaaaatatttatctaaatccaaatttttgtagacatctgtcttaaacctacatagaaaaaaaaaaaaaaagtaaaactttcctagattttgactgtgctgatactgccctgccatgctcctgctccccgttctctgctatgagtctccacttggctcagcgggcgacgaagaggcctgctttagaattgctggtgtactacttcacctgaacacgtaccaatcaagaggctctgtgcttagctgtgacttggagaatcatgactctactaatttgttttgtttttgcttctttttcctaagcactaaaagtgactaaattaaatctatgttcataaacagtagtaatgtcataatgtttacgatctcagtcacccacttgttcactgtgcactgtcattcaactgctcagaatgctgttcccaaatgtcaccatgagagacatatacgaaagcctaagacaaggctcttgtcctcaaaggcatacaatttatttaaggaaacaactaccacatgtaaaaggcagaggtgaatattaaactgtcctctcacagttcgctttttagccaccactaattatgtgtttcccaagacccagctctggggtaggcattttatatgcgtcactctcactggatactcacagcaaccctagaagggagctaccaatacacactacctttatttttaagatatctgaggtttagagaagtaaaatcattgccagctaaatgcaaagctgagatttgaccccaagtctgtctgattccagagtccaagctcttaattcacatagacaactctaaatgtatcaatcatatttaatatgtataatgattatacaacaaaattattcagtgatctcactttcttctaggattagaatgttctctccaccaagcccagctccttttgcaggaaggagtcctctgggctccatccctttctcacgatgttgtattaatcatagcattattctgacaaacccttgactgcaggcacgcacttcagatacataccattttcacccgatgatgtctctgaaacactttcatatattctacttgatactaagtttaagaactgtaatcatagtatttttggtggtaaaggaagtgtctagtttaagttttagggtcttcagtgtaatttcttcaggagttgttactaccaggatccggaagttagatttctacccttcaatcctgactgtggcagggactgctcccagggacattcagtgtgcttaagaatcagcaacattaaggacaattacaataaaacacctgtaatacactcatgggcggactgtgaaacttacactgtttgggtaacttttagacaaggagcactacaaaaaccagcaaggcaaggggctgatgagacatgcatatgtgtgtacggatgtaatgtgtgcacaaactcctgtgcacagaagctgtgacacgttcaaccctgacatattacttctggctactcctgggaaatggaacaggtagctggagggaagagaggagagaggagggaagagaggagacaggagaacttcattttatacactactttattgtggccatctttaatctttaatgggcatattactcaaataaatttaaatattaaaacattttaaagctcagagtgaaaatatagacatatttgatggctgaaaactaaacttaggctggaaaatctcaaatcaattattttttaagccttatatacactaatatatggccacacatataaaaaactcaaactccttagaaatattgaagtggcatatcctatatgactttttctaatgtttttgagttgcagcaaatttttaatgaaatggatcacgggtgctaagtatcctcttactgtaaaaataaagtttgctaaagccagagggtctttcacgatgctctagcccaaatcctgtaccttaaaacatgaggaaatgaggtctaggcatgtggaataatttcctgaaggtctgagtcagcaggagaaactttcctaccaaggaaagtgttcagaaggctctactgctcgagccttttcctgcagaggtgtgcatcgggatcatggggtgtgaatgccaaccccccttcttcccgctccatgccagagccaccaaatcacactctccactcatgaggacccagcctgtaccatctcatgaaggtttcccggtgattccatcccatgctgacctcctcagtacaggtgctgacagaagttgaaaaaaattcactctttttttaacagttttgttttcagtcattataataattactactggacatattctggaacaaagcatattatctatttctttaaaatactatttgagatacagagaaacacaataggactatggacatataagaaatacacagtatttctcaagtatggttcttaagtaccataagaagcataattaacattgcaaaaaatgcaacaaagaagtggccgggagagcccacctgaagattccatctgttcttcaactgcttattaagtcctaaaacatcacccagaatcttcctgacaagtctgcaactaccgaccaaatcattaaagcctgttagaacaaaagttaaatgaaatgtagtctttacaacattaaaaaaattaagaggaatctaaatggctatatacatttccattgaacagcatattttccgtcttcttggaaatacctttgtggtggattgaatggtggctcctgcccaaaagatacatacaaccctggaagctgtgagtgtgaactgatgtggataagcatccctgaagatgtaattaagaacctcaagatgagaccaccttggatttatggtggaccctaaattcaatagcaagagtctttttaagagaaaggtagaggagatttgagtcagagacccagggaagaaaggtgtctgatgacagatgcagagactggagtggttccgtcacaagccagcaggttcctggagactgggaggagcgaggataggtccttccttagcgctttcagagggagccaggccctcacggcacctggaattcaaactcctggcctccagaaccgcgacagaatccacctctgtcgtttaaatttatggaaagtagccttagggaaataaaccttttttaaaaaaattaatggctttattgaggtataactgatataccaaaaactacatatgtttaacatatacaatctgatgagtctggatatacatactaatacacctttttatttggatagcaaatgaaagtactgaaaaaatattttctaaaagaattgggtaacactggtgaacaattccattattcagagataaccacttttattaccttctgtattttgttagtgtcttcacttgaaatgttttatggcttggtaggcttatcactctacacacgagacaaaaagcagaggattaaacaagtaactcagctccaaaggtgatctgggatgaaacaaaattcccaagtggagtcatgctttccctcaggaggaggagagagcaggatgcctcggctctggaatgggacttccttaacatctctggctgagaaccacaactcagctaagtcttttgttttcagttatgaatatacaaaatatgacacaaattatacatcagttctgagtatattatttctcatattctttcctctccataacagaaaaaaaactccctaaatattgacttagtaactctattaataattatacattctagcttcatgcctgtaacacacaaaagttccaactctaaagctgtttcaactaaggaccaagacagaacagactctttgattctgagtaaagcaaaatagcctctctgtcctcaagagttcacttcaccagcaacatgggcctcagggtacaataagttaatcaaaattttttttacaaaactaatttgcctaatgttatcattagtcagaaaaacttacctgtgctcaccctgtgtttacccaaactgtcctttcgattttaaccgtacctcttgcttctcttatacagcagctaagaaagaacagtaaaaaggcctaataccaggaaaaatgaacataaattacataaatagggaagatatgagaggtcagagatttaagtaaaagtgctttagaactttacaggacatgtgttacaaatcttgggctcctaaaaattgttttaaatgtccatggttcagtgttgaaagagagcttgctctgagttaggtaagctaccaaagaactacagggaccaaccagatgcatggaaaacagagagggcaacaccactggtccagggtcaaccaactgcacggaaaagagagggcaacacaattggtcattattttgatttttacaatgaagtattaaataattaaataatttatttactattattaaataatttatttattattaataattgataaattatttgatgcttcattattattcataaattaataattaacaaataattactaaatttatttattaataataaatttattaataataaattaataaagcaccatgagctacagaaataacagactgtaactgtggaactccagatagcacctgactgtccctttgtaaacatgtcatccatggaacattctagtctacggatctgtacccaaccagcttaaataaaatgaaacggccccagaacaaagctgtgtatgtgacttagagatcatggcacagtcctgagagctgtacaatgggtggacagaaggcgcaagtgagcgggagtgacagaaactacatcaagggcagcatttgtctgtgtgaactgctatgcctcctcttccaatgggtgaaagggaaaatccttcaaatgtggctgcttttaaaaatctttcatgagtatcacgcctggttctgtggtggatacaataatgaatgaaggtggtcctggcccataaggacctgagccaacactggatccccccgaaacacacaccagagccaacactgaacatgcagagccgacaagccgactagtccaccggcagggaggcgtcacgtcctccgcttctgcaaaacacagattgccttgctggccacgagcaaacacgcagcttctccttcactttatcactcagcacccagcccctcagagctctggactgtgagctcggagatctccgcagcaccgcaccgtctttactcaggtggtgtcctaagaccacacgtcactacagccggctgcgcgctctttcggcagctgtggccgtctcagcagctattgtttgtccctgaagtactggtgccggcaggattaggcgtggagccaaaaatggaattctattcatagactggcgaggctggaaagcagctcagaactcatttagttcaaactttcagagttccaaagaaaacactaataaaatggatcaaacgactagtctaaagtcacatggggagtcatacagggaccccataccctagtcttcagacgtctcttctgctttcaattctaccttactagctgtttcttgttgaaaattgatggcattaaaacataagatcgacagcaaaactcaatttacagggaattgccttcagtgatcctataaatgtcagatatagcagggtcagaagaagaggatagggtacacaacccattttataaggttaacatcatgttgacataaaaagactaatctcaggcacccaaatgcaaaatcttaactataattttagcaaataatattcagcagctatagaaaaaccaaatgctgacagaatttatcacaaagattcaagttaaccaatttgcggaggaaaaagtttgtcatcatcaacatcggcagaaatgtactgaataacatttgacttcttgcaaactttagggatgatatacttcacttattttataaaataataatgagcatgagaaagagataggaaaaaaatctacagattcctccttaaaatatctgcgtatcttggtaaaaagactgcaaataggtaatttttttttaaatgaattcctgccattgaaatgcgactggcccgtcctttccttcctttgcagctatcaaatgttaccggaaacccctggaagttgtttgcagctttagctatttcctattgcagtttgttcagtattcgttccagccacaataaaatgccatttactctggttcagaaaaaaatagttgtaaagtgttactggactaacacatgatgagcacccagtatacctaccagctattctaccattttgtaactttactgcgtgctttagggattaccacacataaactatacatcgctgcccagtctgcaatcacaaatcacatttcctatagtaaacataaaataattctatactaaatacaggattttacatgtaaagaagcgaataaaaaacagaacactgtataacgccgtcctctaaaaagcatatgaaatggaaactgagtaatttgagtataacatgtcgacacagaataagagaataaacaaaatgggggagatgataaagacctgctaagtatacttagagccaactgtttgagctgaaattgggagctctgaaaacttaacaggacacatcaacacagaaaaagtaggaaaacctcaaaatctaggaaaatttatcttctaatgagaaacaattacttcccaatgtagaagagatctaacagtctactaaccaacttgcaaaatcgtatctgagatctcaaccttgatactgatactctaattgctctatttaaagaataattttgttattaacaaccaagagaagtgaaatacaaacatcctttctaagcactcttgcttagagcaacgggagggattcaatttttacttcagaaatataaaagtctatcccttcaaaataattttaaaaatcagcaatcaacgaaattgtttaactagtcccaccagtaaatacgtccactcatcaggagtcaggaaagcacagtagcttgtttttgtgtggctggctagtgaagaatggcttttgcatttttaaatggttgaaaaaaacttttgtgatacatgaaaagggcagaaaattcaaattttattgaatttatttcgtttatttacaaagttttactggaacacagcggtgctcactcatttccgtatcatctacagcagcttctgggctacagtgacacggctgagtggtgtgacagagactgtatggcccacaaacccaaaagccccgtgtggccctttatagaaacagtttgatgacccctgcggtacatgcttcataaaactaagtttaaaaatctagtgttacttaaaagtttcccatttttggtctgatggcaccataggaataagattagcctgaaaagcaactattatatgaaacagagtccctcaatgcaaagagtagataagagacagaaaaactggctccacaaccacatttacacccaaatgcaaaggcacagggactgggagtggcaccatgcactgagaagcggcagccaggaaattcacattgcctgacctctggtagctctgacctctgtgaagtcttagattatttgtaaaatgaagaaaatgtaaataaggagcacagcaggctattggtatctgtagtcaccatctcacagggctcttgtaaagatgaagtctgtggaagctgctcgtaatagatgagacacacttgtcaatgttcctctgactcctaacgaaagttctgttccagccctatccaaaagtgatggcaagacacagtagacgggtggaagagtggtataaaaaaagacttcagagaatgagacagaaaggggcaaaacaaggaaaattaggctttgctggtttcccttgggctatctccttcaagctcagctctccaagggaacaggcatgagacagctgatggaccagcaggaccagcaagattctaacagtgcaatgtgctccacaataatgagatgggattttgagtaaggatcactctccaaaatacatgaaatttttactctacaggttgggcgcagtggctcatgcctataaaaatcccactttgggaggccaagatgggaggattgtttgagatcagaagttggagaccagcctgagcaacacggtgagacccctgcctctacaaaaaatataaaaactagctggtcgtggtggtgcaggtctgtgatcccagctattcaggagaccgaggaaggaagaacttgggcagaggagtttgaggctgcagtgagccaagatggcatctctgcactccagcctggacgacagagtgatacactgtctcgaaaaacaaaaaaaaaaacaaaaaaaacttcactctacaggatggaggaaggaaaacctaagaaacattaagctgaaacaaactcaaaacacaaaacctccattaagaagattcactatttatcaaatgaggtttttatggtatatacatattgaattgtgtactatgtgattgcattatgtatttaaaatctcaggaagacagaaatacaggtagcagctgtcaaagagcctaaaaccttttaagatgcaaatatagacacacagaaatcacaaacatacatatatagtcaaagaggatgccctgtaccattaactactaaacttttctgataaatttatttttagtcataaataaatttctttcttactgtatttgttctcaaagaggaagatgaatgagaagaggtaaaaagtaaacattggttagataaaatcagtagaccagtgaaatggacagtgaaaggtacatggatatgcacatatattcctataataatgtggcaagttcatcagtaaccacaataaggtgattttttttttttttgagatgcaatctcactgttgcctaggttggagtgcagtggagtgatctcggctcgctgcaacctctgcctcctgggttcaagctattctcatgcctcagcctcccaagtagctgggattacaggtgtgcaccaccacacccagctaatttttgtttttagcagacatggggttttgccatgttggccaagctggtctcgaactcctgacctcaagtgatccacaagcctcagcctcccgaagtgctgggattacaggcacgagccaccacacccagccaaggtgctcttaaaagcacagcatccaatactgttatggaaaaacccaagatgcatatccatgtatacagtatgctatctgtataaaaagatgaggaaaaaaccaacatattctttcttgcttatatacaagtgaaagaaaatgcaaacactagttgcctctaagtagattttattattcaggtatggtgaggcaacagatcaggtacgaccgccagtacctgaaagtacctgcaaaggcagtttggtacttccccaagaggaggccataccaccgccactgaaggtggcaaaggccgaaggccgtgctgggccatacgggaccatgccagggttggtctggaggtggaaggaaccgggaaagcttgactgaggatctcacagaaaggcaaggtgagacgctcaggactggctggtttaagtaatttcaaaggctctggggcatagctgtccccagttgtctagcactggctctgatatgacttgggcgtgacacagatggtggtgtggagtgggactctggactggtcagcttgcatatgaaaagcacggtcctgcaccagtcatctgctatcccgagtcctggaaggggcagtccttccccactcaatgagggcccagatgccacagcattcaggatacagaaaataagaaaagagagttaatatactaaggaagggaacggagtgtctggagaactgggtgaaagtaaaacctgactgggtatcttcctgtactatttgcacgttgtgccatgtgattgcattacccatttaaaacaagtgatagaatttatgaggtgtgctacccacacatacacatacatcacaaacacacgtcacaaacacacatctgccttccggccttgctgagcagggtaaactgatgatgaatggtacctggggaaggaggactgagaagtgccattccggctactgggtacaacacaacagcacaatttgggagggacaaaaagtgcatacatatctgtatttccacaaactccagaaacataaccaggatattgctaagtttcgatttaaaataaacctagaaattcagtttttactccaagacacagaaaccctggttaagaagattcactgtttattaaaggaggtgtttacagtacatacatattgatggcacttctaaacttaaaaaggcatctttttctgatttaaaagcaatagctgaccttccacttctagtaagggatcagatttatgctttaacataaaaccaccaagaagcagacaaaatgaatgcactggcagttgaaaggacactagacatcaggcaaagaaagacaaggatccctgagagaaacagatgaggggacacccacgatcgcagcagctttctgccttgagacagtttccagacagctatgcacccctatgtgatgtccaagagaaatggaagtatgtgtccacagaaaggcttgtactcaatgttcacagcggatttacaaactgccaaaaactggcagcaatacaaatgcctattactaggtgagtggataaacaaattataatattaatctatctatataaaggatacacagcaatgaaaagaaacgtagtcttgatacacgccaaaacatgcatgagtctcaaaataaacatgcgaagtataagaagccttaccaaaaagagtatatgccatgtgagttcaccaagataaaattccaggaaatgcaaactattatttagtgctagaaagcacaccagcatttgactagagatggaggtgggagggttgggagggggaatacagagaagtgtgaggagacctttgggaatgatgggtgtggtcactgcctgatagtggtgatgttttctcaggtgtaaaagctatgtgaaagcttatcaaattgtagactttaaatatgtgcaatttgctgtaagtgaattacacctcaaaaaagctttttaaaaataaagatcaatacttggtttgtagcaaaaacgtgaaaaatatcaaacatacagataagagagcaagaccatggtctcttctaaaggacacacatgtctaaaagtaacacttcaaaattattaataaatgccaattgtaagttgcatatcaactcccccaagttcaaagcaataactttaactaaaaagactctttgcaagggtggtgtcgatttcccgaggttgttcgtgaataatgagtcatgagaagctcacactagtctcttttgtttgggactccctttcttctctgtccttgacacaccacaaagctgtgatgcttttgtttgcaggcgctgcagctgccaaggctccaatctgagttctatgctcctgtctctcttccaccttgagcaagtgctcaacttaagttaaaagaagcacatttaccctgtaactgatgatggacacagtcaaacaaaaaatgttataaaaattagcaatgtcaacaaaagtgcatatatcacaaaaagagaatggatgcggtctttcacttgtatctcctaaaaatgaaaacccactgcccccctacttgcaaacaatataataagaatgtctgaaatgcagacagacagttcttggcaccataattaagcacaaaaaccttgaagagaaaaaacattcaaaaaagttcactcaaacttgtggtttagaacacaaaattcataagctcactcactaaacccactcctagaaagctttcttgttgtgacttttaaaatattttgttacactatgacaaaaggggaaggagaaaaagatattgaggagatgtctccctcttttccaaaaagacttttatttaagtttatccaaaatgttgcaaggcagtttatactgactcaaaaagaggtcacttttattaataaaaataacaaatattctctttaacccttattctggcattcgaggttttccactgagggtagccgtctcccatacacttatttcttggtctccaactcaccattccttcaaattgtcgccgacatgaaaacatctcctacctcctctccatcaatctattgttaccatcttcacaatcagcccagtacccgttccaaggggctcatcttcccaacataaccactgccagtttcccacttccaccggacccgtgagggcccctgccacgcctccaccggacccgtgagagcctgtgccacactgctgcacacatctgttcttcttggttatttcacttttgtagatgacgaactttcaaagatttggtaaaaaaatttcatagttcggtaaataaacacggccacgcactgcataacgacgtgtcagttaaccacgggctgcatatacgatcgaaccgcacatacgaccgtggttgtgaaagattaataccacatttttactgcaccttttctacatttagctatgtttggatacacaaatgtgttacaactgcctgcagtgttcggtacaggatcacggcatacaggtctatagactagaatagaccatcccatacagcctgggtgtgtagtaggctagaccatctaggtttgggtaagtacactctacgttgtccacacaacgacaaaatcgcctgatgacacgtttctcaaaatgcatccctggcattcagcctcccatgactgtacttgatgcataaacaaatgctttaaatgatgataactgtaggtattctctagctgctggacgtttaggataatcaccagggtcccaaattcatgtttctaagaaacaagtgggcccactttattctagcaaatgtgtttatccaaaggcacaagtttatcagtctactagattcttgattgtctgacattcattaacagagcaaccgtaacacccgcaagaggaagcggctgtggcacctgtcccctgaacgacgctgggcgctcctgcactctacacacacaagcccgctgtggcacttgtcccctgaacaaccctgggcgctcctgcactctacacacacaagccggctgtggcacctgtcccctgaacgacgctgggcgctcctgcactctacacacacaagccggctgtggcacctgtcccctgaacaaccctgggtgctcctgcactttacacacacaatccggctgtggcacctgtcccctgaacgaccctgggtgctcctgcactctacacacacaagccggctgtggcacctgtcccctgaacgaccctgggtgctcctgcactctacacacacaagccggctgtggcacctgtcccctgaacgacgctgggcgctcctgcactctacacacacgagcctcaacaggggacagaaacaccatgaatcacaaaatcgaaggacctggaagtcagttcgccccaagatcccagagggaaggcctcactatggtccggatctctggatttccagcccagtgatttccttgctcagccgttaatcattaagtaacacgatttagggtctccaggtggcgagatgggtcagtgactcccaagcactatttcctaccggacggactttcatcagccttcacaatcaggccgccatgatactgacctacctgggaacagtctgctttaaaggttgtaagaagacgaggcatgtgtacttcaggccctgaggatcacaccccaactttctgctgaggtgggggaagagaagcatctagaaacagatctaatgaagctatatttactatattatttaataattccatgctaaaatactgttcttcatcttcagagactttaggtgatctgtggaatgttgagacttctttactaaccacagagtttttaacatacttcacaacaaatactgctgtgtactaactatggtatcctccactattacctgacttcaactcataaggaaagaaagcctctgtgtgcattgcactgaatttcctcctgccgccctgccagcggagtgcctgtgctcccgccggggctggggtgtggctgtggacacctggagagggtttattccttctgaagacaacagcacagacatctctgcaaacaccttttctttagagttgtcagaatagagagatttaaaagggagaggcaatgccatattaatcatgtttctacaacaagacataacaccatagcagacacatcatcatttctggggtcccaggaagaaccaagggttttcaaggctccccacagcaatgctaagctatataatctcctcagtttctttctcctcctactcctcaaacatatattatgcccagacctatgccatgtgctcagatatcccaaaggatatttcttgcttgctcatctatctcttcacagaggacttactctaatctaaaagagagacagaagacacaagaaaattgaaaacactgcttagtctaattcatcaaacaaattactataggggtagttctggtcttgaattgccacctgagatatgacatatacgtgtgttgtggggaggggtacatatttgtttctgtccatggttcctggctcgttaactcccagaacccctgttagtctttggttataatgttgtggcactttttgcctcaggaaacagaatctctctccgggccacctgccactctcctttcacctgccaaggcaggactccaatctgactgtgtgtcataagcccctcattccagagagggtcccgctccatatcctggaggcggaaacgctgcagacagaggccaagaacaatctcaagagacaggcctttgtcaaccacatgttgacatggctgtccgtgcgtcaatcatgcctaggcaatgaagtctccataaaaggcccaagaaagcagagttcagagtttctcaccgctgaacacgtggaggctacgggaaggtgaacaagaactcatccaggtgccgggagggtggtacaccctgactctaccgggacagaaatgcctgtgcgtgggacccttgcagactttgcccctgtgtatctcttcatctggctgtttatttgcatcctttaaaatatcctctgtaataaacaggtaaatgttaagtgtttccctgggttctgtgagccgctccaataaagtaacagaacccaaagagaggtcatgggaaccgtcacttggagctggtgggtcaggagtttcggaggcctgggcttgaagagaggttatgggaaccctcgcttggagctggtccgtcaggagtttcagaggcctcggcttgcaactggtgggaagaagtgaacactcttgggaactgagcccttaacctgcagaatctgaggctgtctccaggtaaaaaaatgtcagaattgaatgagaggactcccaaggtgtccgctgcttggtgtgtaggaaatcctcccccccgccccccggccagccccccaaacacacacttggtcccagaagtcttctgtgatgatgattgttgaggtttgggaagagggtaggaaaacatctctttgagggtttttgttcacactcacattgtgtcaatcaaggcttttacttctagatttctctctctggaggtctgggaccgccactagagaggcatacatacattctggactccaaattcatcctcacaattcttatatacctctgacttttctcttatgtttgacaatgcctttaatttttcagtacttagttcttagctcacttttgctttatttcacaaggagggtgaacgcagtcaccacttgtgcagtaaaggaacaaagattagaagtttataaaaatttcggaggaggattttgaggtcatggagctatcttcttggaagcagggaagtcagtcacagacatcgatggaaaaaaatattagaagcaaaaggcctggggtgtcacttcaggaaagtaaccacttccaatctgaaaactgttcaatcccaatcccttaccacctgcagatacagcactgctctataggaaacacttaaaacattaaaaaactagccaactgtgaaataaactcttttaatactctttacaaaaagccgacttaggacaattcaaattcttagcagcagtagaatttgctgtaagtttaagatatatcactaatttaggagctattactgaaataacaatgtttgctttttaacctgaaagtgaaaccctactaatgagcataatcgtaaaatagctttataaaagcaaactcaaagtttaaaaagcacatttaagctaatttttttttttttgagatggagtctcactctgtcgcccaggctggagtgcagtggcaccatctcggctcactgcaagctccgccccccgggttcacgccattctcctgcctcagcctctggagtagctgggactacaggcgcccgccaccacgcccagctaattttttgtacttttactagagatggggtttcaccatgttagccaggatggtctcgatctcctgacctcgtgatctgcctgcctcggcctcccaaagtgctgggattacaggcgtgagccactgtgcccggttatgctaaatttttatccaaaataaaggcttattttgaataattcaaaaggaaaacaatttatcaagaaacaaaagtatgtaacagataaatgctaattcttacttttccccctaacagaaaagcataagcataaacatttcctatagcagtattaacacatacctgttttaggatgtattgaaaagaatccttgtggatttccacttgtaattttgtacatgagcttgtcattagagctcgaatctggatcaaatgcctcgatctggaccacagatacatctttaggagaattttccatgatttctgggtaataaacaggctctgatgtctgtggtgcattgtcattgacatcctcaacctctatgtagatctctatgaacgatgaaagaggcacgacaccctgatcggttgcaaagactgttagccaataatgggaggtcgattcacggtccagtcgatctgacgtctctatgacacctacagagaaaaaagaaaagcgtaaagcagcacatcaacgaccaaaactgccagcttcagaaagtgtcaacaactacggcttactgagagctttatatgtctcttactaggtgcataaccttgagcaggttaaccagcctttctgtgactcagcttcctttcttctaaaatagagacaataatagtatattcaactaacatgcatataatgattagaacacttggcacataatataggctataaaagtatttgttattagaatcaggtgtcaggcactaaatggagcactttaaaaatattatctcactgaagtctcaaaataggtgagcactaagagatcatctaatggcccaacacttcatttttccataggtaaagtttatagttggttgagagacgtgctgactttcctggaggctactcaggaagacagggacaacaccagagccatggcccagatctgagaccccacagtccagcacccccgctccccacactgcatccctgtggcggccactgtctaaggaaaaaggcaggagcagcatcctccagaaagctcggtctgcacacacaccccttctcacagtggctaaggaaagaaactgcaaccttcaaagtccacaataaggggctgctcagatctcctgagtgttgaggtccttttatttctttcaatcgcctcaaacaaatgggaagacaaccagcatgctataaaaatataaactacactataaactccaaaagggcagaggccacatcattcttaaataccagtatccgcagcaccttacacaaagcacaataacgtattaaatacacaagtgaaatatctaagtatcttaatcagggttggtatagaaaagtcctcaactgggacccaaactaggatacatttcttagtaagtcaactagcaagagatgaaattatatgattacaaagaagagggttagagtatctgtaatgttttggtccagccactgaaaccagtcaaaacttaacttcaagccaggatttacctcctctggggataagaagtagaaatatccatttctctttggcaagtcccacctttttattcaatggtgcaatctcgccctttgtctaccaaaaacatatcactgcactttttctcatggattgatcactcgggactaaagatactttcagtgttcttctacaccatggtacaggctggactctggaaatgctgaagctctagaatcactgaagtttcccgttaaacgcaaactactgtgagaaaaataaccaattaccaattttacctatgctcagcaatgaaacatttggttgagaaaaatacactgttgcaattcgtaattttgatcacacgaaattaaatattaacttattcgaggttaatatcagaaaaactcattttttgaatgaatgataattatatctaatactcccaaaaggactcacaacttgaaaatagaaaacttagctaaataaaatgtgaaattatcataaaatgaatctttattgccattcagaagcattacaatgatttgttattgcttcattatttcatactgaaccttcagaaagggggtataatactgcttctagaaacatggaagaaacctcagaaccaaatggtatttctagttctagatccctgaggaatcgccacactgtcttccacaatggttgaactagtttacagtcccaccaacagtgttaaagtgttcctatttctccacatcctctccagcacctgttgtttcctgactttttaatgatcaccattctaactggtgtgagatggtatctcattgtggttttgatttgcatttctctgatggccagtgatgatgagcattttttcatgtgtctgttggctgcataaatgtcttcttttgagaagtgtctgttcatatccttcagccactttttgatggggttgtttttttcttgtaaatttgtttgagttctttgtagattctggatattagcccttggtcagatgagtagatggcaaaaattttctcccattctgtaggttgcctcttcactctgatggtagtttcttttgctgtgcagaagctctttagtttaattagatcccatttgtcaattttggcttttgttgccattgcttttggtttattgcggcactattcacaatagcaaagacttggaaccaacccaaatgtccatcagtgatagaccggattaagaaaatgtggcacctacacaccatggaatactaggcagccataaaaaaggatgagttcatgtcctttgtagagacatggatgaagctggaaaccatcgttctcagcaaactatcgcaaggacaaaaaaccaaatactgcatgttctcactcacaggtgggaattgaacaatgagaacacatggacacagggtggggaacatcacacaccggggcctgtcgtggggtggggggaggggggagggatagcattaggagatatacctaatgtaaatgatgagttaatgggtaaagcacaccaacatggcacatgtatacatatgtaacaaacctgcacattgtgcacatgtaccctagaacttaaaggatagtaaaaaaaaaaaaatgaaataaaataaaataaacctcagaaccaaataaaaatgagctaactggttcctccgtacagcagacaactgaagatgaactcaaacatgcttccctgttctctaacccaagcataatgcacacacactcaactggtctgctaaattagcaaaattatatctgtctgtaggctcaaataataacctttcccagttcctctgattcatcacatctatccacagatacaaagacgtcaggggataacagaatgttctctccgggaggattacacattaacaaaatgtacacaactcctcctgtgtgctgctacttcattaaaatgcaataaaattcacttgacaggtgaagtattattagaaaatctcaagaagacaggtacgtggtgcttttatctacctcttttgagttctaatcctccaacaattcatgcttccatctactgttttaaaatgtgcccctctaaatgtgactagaggcatttacaaacagtgataattacagaaacaatttgctcagtgtttactaaatgccaggccctgtgataagtgtcttacatgcattatcttatataatctttacatccaacctgcctagatatgtgatgctattaactccatttcactaacgaaaaactcagattgagagaaatgaggcactttcccagggccacagtgaatggcagagctggagtgtgaataccacaaatctcatcttcagcgccagcaatatccttgtcagtcctacggctgttatgacaaaagagtaaacaaaacttaatgtggtaatttgggaaagatgagtcaaacttcctatttcatccacctgttctacatgtcagtattcagcaggaatgtattaaatgttcactcatacacaatagctttctctaatctcaagggaaaaaagaattatgaaatggaagtatatcaccctcacatctgaggtttgcaattacagatagaaacagctatgatttttccgtcgtgccttatttctagttcgggccgtaagcgtccagactgcagtgtgcaattctgagatggcatctgctggtccccaccgacccatcagctgtacaaccagggggtgggggacagtcatgtccatcaggaggggattgtcggcctccccggtaatctacggatattactaaaggttaagactgaggcaacaaagcgactctattcaaatatcggagattgtgtaattcgcaattaaaatagtaagtatgaatgagtgagatgctggatgttcctatttcatgaattcatgactgtgtacttttataatgcctatcgtgattgctgagataagcttctgcttcgatgcattttaattattacctctttgtaagataaaaaatcactgaatacaacttacggagaactataaagtaaatttcaactgccaaagggagaggagggcacaccgaagaatcttatcttctaaccaaaatcctcagatccctcatgtccaccaatcacgtcactagatgctttatgtgcattaaatcattgaaagaacatggaagttgcatgattttcatcccagctttacacatgaggaaagagaagcttagatccattaagaaacttgcttaagccctggagtgatgaggaaacaaggccagggtcaacagctaactggtgggatccggagctgagccggacagtctgactccaggcctcagggtcttctccactgagcggtgggctgttgccactatcaatcaacagcaacactgtcggacaccaaaggtgctggggacctggtggggctataaccatgaggaaaggccacaaggagtttcccagtgtggaaggaagggtcttcctcatgcatgcaggacaacagacgggagacgatctgaggattccgctcagagttttggggttcagtacctaggcgctattataggcactgcacaaagtgggtggaaggaagccttaagcgtgccaagttattttgttttccgctttttaatctgtcagcccagttgcatgatacactcctcaagaaccctgggcagaaacttccaaagtggacctatggcactagcccgagatctctaggtcaaaaccccgaagcttcccatcttgaatcagaggcaagacgaaggtccaggatggctgagtgagagtctagataatgtgcaaagaaagaccaggggtagagctagccttcgccatctcaaaatcaagcattagactgggaacgccttcaaaaccctccagtgcaactcccttgttcttaaagaacgttgaaatgatttgtccaactccaagaagctaaacaggtgtagttcagaatccagagtgaaggacttccttaatcaggggttcatcacgatccaaaccattctttaagggagtcctggtttctgcagggagtgacacaccagctgtctccaagtatgaccgaagctgcctttactcattaagtcattagcagttcttgttcctacacttcatcatgctttcaccagtccttcctaaagccacgactggcatttacagattacagattgatttcttctgtaactttagcagttacctcaattccatagagagaaacaaattttcacatttccattgggaagacttctaattagtgcctttaacacagagaaaaacaaaaataaaactaaagacatccagtcatcactggatgtgaatcaaactgtggtcactctcaaacctctatccctgtctatttctctttatccatgaatgtctacctatcaactttcaataagtacttttttatatagtgggttataaactcaccctggagacaaaaggaaccaacaaaaactatagtttttacaggtatctttctatttacacatattcacgacctcacctttttgggcacctatgtatatccacccccaaactcttctctgcggtctccctcctgtcttcggcatctcctcccctctgcgctcccctccttctacctttctgaaagcaaacacagcatgcggccagaaggtgcctgcgcccaggctgtgaggagggagggctgcagcccaggccttccgcaggattccctccagccagatgccgggagcaacagagccgtgagaggggtgacagggaaactctgtcgccactcccgtcaggaggttgccgtgcacacgcagtgagagcggtcgtgatgctgctgcgtgatgctatgacgcagatttggagcacaggagacaggttgagacacgcttgttacgtgtgccactcagcagtgccatcagaaatcacggctttacctgaatgaagcattacggaaggaatgaaagcctagctttccaacctcgagaatacagtgaagttgttaataacctgaaaaatccgaaagaagccggaaatttggagttattaagtaagaatatttatcattccaaacatactctccaggatttcaaaaccaccaccagatgtcactatggaaactcactttaaatatgcatccagtggagaacgagactgaagggggaaaaatgtaatttctaaaagagcttaaccaagatagttgaaaatagagctcacagcaaaatttctgtatggaaggattcattaatgtccacttacttaactaaacggatactgacgttgtctttccacagcctgattattcaaaggttatagggttgctccaataaacggttcaaaagtaaatcacagtttccaataataactcctactccccgccactgctggcccctgctgctgttaaggaatagtccttgatcaggaaaggccagcattccctcccgctgacacaggtggaacaggactcttgcaacacagtaatctttaaggcaaaaataaagttatagctatgatgtttgccaaaaataatttaactgattcaaattcccatggccacagaacacctttcctcctagaattttcctattttaacaggtcttggcccccaatcaagccttaatgccaaggctttcaacaaagcctcgttacttctgactctcagaaatacctatcatcagcaacaacccagcaacacaaatttgcaaacgctaccctcctttctgatatgtcacatacttaatgttttaaacttttcatacaactgcttaaggcagcaattgtattaaaagctgctttgttcaatcacaagaaaaacttaaatgtgagatataattttaacgatattttccctacaggcaacaacagacagaaactcttttctccaattcaataccctcagcgtaaacagggtaactcttttgaaaataagcattttcccaaatatgaaaacaatactcacggaaaaagaagagacataccatcaacacactagagagccaatatctctgttgctgcaattaatctataaacggttattcaatttttcctgctaattatgcaaagactaaacatctcagaattgtcatattaaatgttaatcactaaaaacatcaattcttccttaaaattaaattttaaaagtagattgtaagcttcctattagaatgcaaactttttaaggacaaagaattgttacgtgtttggttcaaggccgggtcaatagtgagtgcttataaaaaatgatatccattacagacaagcaaaggaggagaaacagtcgcaggcaagaggagaccagagagacgtaactaaatgtcatgtgggagcttggaccacagaaggcaccttaggtaagaactcagaaaatctgcatctattatggacttcagttagtaacaatgtaccaatactgattctttaattgtaacatcttacatactcatgtaagatgtcaacaacgtgagaagctggggcagggagcagggagttatgtgagcattctactttctgctccatttttctgcaaatgttttatttttttaaaaagttgtctatgagagctcataatatgtagattgtttccttccttcaattaaaaacttttttgaacttacctgtttttaatctcgttttcattaaatactagatttagactgatgttaatatttccacatcttgatgataccttgagagcctaatgtgtgtataagaaactttacatgttaaaggctaaagatttaaataacaatctaattcaaaatataatttactgtaaaataataaaaaaatattacttgttttgcctattatatacaaagaaaagctgtaaaacgagtttaatataaaaagcaaaatttctgcaatttagcctttctttaaaataactgggccgggcatggtggctcatgcctgtaatcccagcactttgggaggccgaggctggcagatcacctgaggtcaggagttaaagaccagcctgcccaacatgttgaaaccccgtctctactaaaaatacaaaaaatgagctgggcgtggtggcaggcgcctgtaatcccagctacttgggaggctgaggtaggagaatcacttgaacccaggaggtggaggttgcggtgagccaagacgtgtcattgcactgcagcctgggcaacaagagcgaaactccgtctcaaaaaaaaataaaaataaaaataaaaataacgatactagtttgacatgcagtattatctcataaatcgaaacctttgaattcttttagaaacaatacagtagatcgtgtgtgtgtgtggtgtgtgtgtgtgtaaatatacatttaatgttcttgcttctgccatcagttggcaaatttatgttatttactactgtggactaaaatagaacaagaaatgaaaaaggaggagtctattgggctgaaggcatttaagattctaaaatggctattcagtctactttctcagggaatgacacaggaaatgctctcagaactaaaatcaacatttgttactttcctttcacctgaagtttataagatattactatttacttcactggtgttgctaatcataaaacataaggaatatgtaaagaccaatgtttaatggtttattttgcagaagaaggaaaaaaacaagttctagtacttttaaaaacaatgttctattatgtgtgtatacatatattaataaataaaattttaattgctagagaccacttctataaatattttatgtttttgataataaaagaaagtcaaaataagtaaaagaaagtaagtcaaccaagaagcatccctcgtgggccaatcaaactgctaggcagtatactagtgtaccgtacaggtgcctctctgcccccttacagataaaaatacagtaaatcatgtataatttctttctctccagtttaactgaagccatgacactgaccaccatgacccaatctttcaaaaccagtgatgtgccatgagtgccattttgtgagaagccatttgtattttgagcaaactcagtggcctgatgatgactgacagggatggcaacataacagcatacatggactcaagatatagcagagaagaacttcttatacatcagctcatttactccttacagcaaccctaagaagtaggtaacgttatcatatcctatttcacagaaaggaaacagacagtacaagcaacctgccagaagtcacacagtccattagtggggaactgggattcaaccctaaaagtcaggttccagacaatcgtgctaaatgtttggagtccctgcctgtccttcaattggagggaagattaaggggcaactgaacacaacctgcaaatttcaccagagaagttgtgacttgaatgcaatccagaaatgtagctgccagatgccgttttcccaacatttgaaaatctgggctaaagcgaatttcattgtatcgggagggaaaaggaatggacttattatatgatggtacatacacagcttcaaaaaagaagacatgcatattaattacacagaagaatgtcagtgatacagaaattgagagaaaaatataaacgtataaaagtatataaaatatgatgctactgctgttcagaaaaattttttaaacacacatacacaattatatgtgcagagaaaaaaggtctgaaataaacaaggtgatcagcagataaatccatccagtgaacagaaacttttttaatctgtaaatttctgtaaccatggatttaaaaatctatatttaaaatgtatacaataaaagtcaattaaaacaatacctgcagcccagtatcagaaggttttatgtacagaacctccctgttttatttttctgtctatgtcttagatgtactttcatttttaagtatttctgtttcatttgagtagatatatgacaatggatattctggcagcttcgataactaacactgaagtatttatgtaggtaactacttacacaaagctttaggtctaggaaattctataatcacattgcccagaatgagatcataagtcaatgacaaaaggaaaagcaaaaacacaactgtcactgtttgcattatttagattgcctatttaaatcattttaattaaaacatatacctatcaattcttttaattaaaattgctgcaataacttcaaaattagctgaggaagctttctgacttgcaaacttactaaaacgtagtattaattaagtacataatcagattttaagcatcatgtttcaagcccagggatttctttagctctgcaaagagtcattcccagggtaagctctgctaaaccatgttgtcccgctttgttgaggaatgattccaagttctgacttccctgtcagaatcactgatattgtcaatgacggcttttgtggataagctctactgttaaagaggatcacccttgggtatcaaaacttatcatctggacacctgttaattggataaaactacatccacaagacagccttcagaagcattaagatacagagaatatattttacctaccaatggcaatgcttctggaagtttgtttcaaatttcagaagatacgcaatttcagtgttgattactcttctccccttatacggactggatgcagacttagtaaaagctttaatatgccatattgtttaatcttcacaattagcccagtggtctctccccattttccatattcagaagcagaggcttaaggctcaaaagtcactggtctgaagttatttactccgtaataaagtaaccaatgaattaatggattaccttaccagttagtcatcttagagctttacatctaacaacttagcctgaaaagttaaggaagtcatcctcagttatccaactttggtagcagagaagccagaaccccaaacctggctgactggctccagagtccacacataaaaccagagggtactatctccatgagatgcagagttgtgattcaacagccaggtctgactctcatcaatcaatcactgttagtggaaaaacaggcaacacatccaccaaggtggaccagcacttgcctgtggtgggaggagcgatggaacttaagttataacaactaaaggaaggccaaacagatccctgtatagagttcaagaactccgtgtgaccaggcccatttaggataaaaaagaaaaaaggatattaaaaaaaatccaacactgctctctatttaggaagttactgtgtttatcatatcttctttatgtattaaaaggcggccaggtacagtggttcacacctgtaatcccaacactttggaaggctgaggtgggtggatcacttgagcccaagagttcgagtacagcctggacaacatggcgaaacctcgtctttacaaaaaatacaaaaattagccaagcatggtggcaggcacctgtagtcccagctacttgggtgcctgaggcaggggcatcgcttgagcctggtaggtcaaggttgcagtgagccgagatcatgctgctgtactcaagcctgggcaacagagtgagaccttgtctcaaaaacaaaaacaaaaacaaaaaacctgcataggctaaattaactgaaatatactaggtgtaagtaggtatatggcattatactaacaatactgaatctaactacgagaatattataactgagtcttgaatactgttattaactataaaaaaactagagtggtgggtggcagatgtagagctctgaagtgtaaatcagctgtaaaagttttgtggcagatcaacagaaacgttttaaggaaaaaccctctttaggaaagaaatctcattaagaaaaaaaaaaaactagcctcagcatggtggtgtgccctgtagtaccagttactcaggaggctgaggcaggagaatcgcttgaacccaggaggcggaggttgcagtgagttgagattgcgccaccgcactccatcctgggcaataaataaaaagaaaaaaagaaagaaaaaccagccagatgtagtggctcatgcctgtaatttctccactttgcactctgggaggctgacgtgggaggattacttgagcccaggagttctagaccaggctgggcaacatggcaaaaccctgtctctactaaaaatacaaaaaatttgccaagcatggtggcacacacctgtagctccaggctgaggtgggaggatcacagaggctgcagtgaaccatgaccacaccactgcattccagcccaggtgacagagtgagaccctgtctaaaacacacacacacccacacatacacacgaccctgtctaaaacacacacacacacacacacacacacacacacacacacacacaattaatttttaaaagctgtaccttatttttcaacaagggacttaatgttgtttgtactggcttggatcttaatctggaacctggctttattgatttacacctgttttaattcattcaacacagaatgagttcctaccacatgccaggtatgctacaaggtgcaaaagaaacaaaaagaagagcaaaatgaggtcctatgagaagacagttaaataaaagagtaacttattccttggaccagcagagagagaggaaaagaagggcacctgtttgagaagggaaacagcattttaacaactaggtactttaataattattttccatttattgtataagtatcttttacacaaagaccaaacaaatcctttcttcagttatgagttcctgcttgaattttataatgcaacatgtaataaagtgattttaaaaaaataaatgtcaattcattttgtgaaaaaaaaaaacaaaaaaaaacagggagaagaggatatgcaagaaaaatggcgagttatacggatgagttaattttatcttcttcctgttaatattttctaatgtttctagaagaaatatacatgtattatataaaaatattttttaaaccaacgtgtataaagggttaatctgaagcatataaggagaacttaaggaatttcagaaatgtaaaagcaacctttaaaagttaagagtgacttacaggttttcataggctgaataacaactgcctaaagctcttgtactgcaaagtgtgttccagcaagaagacaaggcactattcaatgattaaaatgtcagttgaaatgactaagcctcatgccaaactccttaaagcactcccttgctaaagaaggaatggaatgagattcctcctgttacagtcaagcactacattggtctctgtataaacagaactctctccaaagagacagttgtctctggagtcctagaatgcacacagctggtggaagggccagttttcctgtttctaaggtttgtttaggcacctgtaaacagattataaatacagaaaaccgcaactattgctctcaaaataaaccctaagaatcatatgcaattcagttctacaaaaaggaaggtgtgttttacatgaactgaatgctgactgaagcaaataaaagtcccattgactttttggtccctgtggtcatggactgtatgtataagctgcccccctgcccatccattcccaagtagcattttcctttactccagcctccacttttatcaaatttttagaaacttctttttctattaaattttatttcaattacaaagcagttcttaaattttaattcaaatctttaaactttaaaaattgcaaactgaagacgaactacttacaagcagtgttcagctacttctaatacccaatttgttgccaaaaccaatacctgtaagaactcagaagcttaagttaggtcaagctaacctaatcaggaagtgattcacggacactgataacctaggagaaacttcagatatgtccttttatgctaacgcttcatattaaatcaaacagccctatctaataatctaaatgcactgcaagatttgatgttaaacctggctaagaatcttcgttaaggcaaaacatcaatttgtaaatgcatattaatcccataactcccgttttctaaattcagggtttttttttttaatgaagaacggtgtatcatataacggaagatttctaattttatatatgttttgaaatcacaaaagagggcacacctgtatgtatcaggattctaaaattgagaggtaagcaatcaaaactcaacaaacctcctacaatacccagtatatgctcagaaactgaacaatcttaaccaagatttcttagtggtaactgtggggcagacaaatgaagtatttaatatgcactattttatgcaaacaggaaacaaatctcataaagtactttgaaagagaattaaaacaggaggaaaacggattactgctaattcatcactttagagactatgaagacaaatcttgctggagacattaaaagactatataagaatagattggcaagtctcaaataactgtcatgtatctacattactaaaaattaaagcacagaactgaaacaagaaaaaatgaaaaatagagaataactgcagtagttcttatattatctctgtccttaactttctctgagagcaaagttgttcattaagagagctgttctttaacaaagtaataataaacatttcattttaaagtgacattttcttctttaatactaaccattaataaaataaagtgataacagaagatgtagaatatgaaaataaacatcacagggatatcaagcagttgatggtatttgaaaagcatatattcaaactaaccactagaaaaaacaaattcaaaaacacacaagtgttcattataacacactagttgtaattaagtagcagggtggttactaaaatatacgtatcggagaagataaaaatataaataaatagctaggcgcagtggctcatgctggtaatcccagcactttgtaaggccaatctagtaggatccttgagcccaggaggtggaggccagcctggcctactgtattaatttattataatataataataaataaatatttattattgtaaattaatgtaatagaacattatacaatgtcattatagacaaatatattctattatcactttattttatacatgtatagctatgtaaatatattacatatattgtcattaatatcaattattgtatattattgatattatgtattatatatgttattaatatattattacttttatatacatattacatacataaatatatatacataggcctgcatataagaaattacaggggaatggcaaggctgcggagaaacaggaacgcttttacactgttgaagggaatgtaaattagttcaaccattgggaaagacagtgtggcgattccttaaggatctagaaccagaaatacaatttgacccagcaatcccattacttggtatatacccaaaggaatattaattattctactataaagacacatgcacatatatgtttactgcagcactatttacaatagcaaagacatggaaccaattcaaatgcccatcagtgatagactagataaagaaaatgtggtacacatactcgatggaatactgggcagtcacaaaaaggaattacatgtgccctgtaatttcttcagtgattggaacagtaaaagtaccttttgtttaaaaaaatatttaggctgggctgggcacggtggctcacgcctgtaatcccagcactatgggaggccgaggcgggtggatcacgaggtcaggagatcgagaccatcctggcaaacacagaaatacaaaaacactaaaaatacaaaaaaacactaacactaaacaaataacactaaaaatacaaaaaaattacccgggcgtggtggcgggagcctgtagtcccagctactcgggaggctgaggcaggagaatggcgtgaacctgggaggcggagcttgcagtgagctgagatcgcaccactgcactccagcctgggtgacagagtgagactctgtctcaaaaaaaaaaaaaaaaaaaaaaaaaaatgggggttgggggaaccccacacatctggtgtcagaagcatgttctgagagtctaattcaggaaactgagtttgttttctatccataagcaggaagtatctcacatcttatttagaaaactgtctgctttttccaaaacctaaatacaaattcaacatgggaaaaaaaaaaacatagcatagtacttacaacactgttgccattcctaaagctcaaatatttccagctcatgacagtatcagatatatgggttcaaaaggaaaagcatgttatcaagtctacagtttagaagatgatttttgaaaaatgactttgtgctaaactcttggattgagattgccttttcattcagcaatttatgaaagaggtggtgaagcaatcgtatattttttcccacttattttactacattggttggtttgctgtagcaggctatttgttaaaatctgaaactcaagaattttttataacgtgccatctaaagaactacttcataattttataaattctcaatcaaccataattcacaggcccagtaaactaacctgtttactgctaactgtacccattaatagaagaccatgagtgtcttccaatgctttcattacctaattggaacagggaaatatcccaaatatcccaacacgactgcaaatttaaagcctcgattaatttaacctaatactgaagacatttgacagatgctcccttgataagcctattttgaaataatgctggcatatccctggctttaattattgtccttaaaaaagaaatacaactcaacagactaacacaatctgttcaaaagagacacgcaaaggggtaccagtgttgagaagcaaaggctaagccatcctattatgttcttcaataagataaaactaacaaattccagtaatatagcatataacacaaacatgaaatctgactatgactgagtttatcattgttggtgacaccactgtgaaaacactgaataggctttaattacacacgaccgtttctgtaacatttctctcttcaggcaccactcctcccctgcccctctggaagggaagaaaaacactcccaaatacctttacaaaggcacatgtggtgggcagccgacctcttacatgaacactacctcataaagctccaagaccaccgtaagttctaaagcatggtgtttggttatcttaaataatcaaaccaacgaatcagcaaagaacaagagttaaaagagagcagtaaagatcatctagtgcaaccctctaattttacagacaaggaagtccagggaataaatgacttcacaagttactaggttgcagagcttgaatcaaagccataactggaacccaaatctcttgaaatctcagtctacgttcgagagtggcacctagtagagaggtgcacgcttgcattaacacaaatctcataagactgaaatcggcttttctgattggtgagggaaatggctcacattaggaaaagcaaaagtcaatgatactatctcagagttaatgatctgccaaccaaaccctaagaaagcttaaaaaataatcggccttaccttaacatggtatcagtgactttgacctaggcacacatctcaatcactggtcaagagtatcaccgaattatttcggaattggagagggaaacaagagtgaatgtaggttttattctcagtctgttacttcaaagtattggccttataatcaaccatccttacagcatgcctgttaactgtcccaactcagcattttaataaatgtgtgactttggcaatttattatacctctctatatttactatttatatcaatatttattattcctcttatttaaaagtgggagatatatgggttataagaattactataaaaataaaggtatttaatctattgaatctattttgatgtttgagaaactaaagcaaaaccaagatttaagaagattcttaaagaggtatgacaccttaatccctaacctctgtatttccaaggatgctattattcaagacagaaactggctactaacagaaatcacacgatgatggaagcggtgttcggaagagaacttagaatcacttattgtagagcccaggtgacattccttatcaagacaagggaccggcattagcagtgctctaaagtgaaatacacacatacgtgcagcacagaagaaagtcagaatccacagcaacgttgttcactgagacacatcgatgagttatttcaactgacagcgtaaagcatttttaacctgaaacagtatgcatcaataccgctgaagtggcagtgaggtctgccacaaactttccctccagccccaaatgaagagctacttttataaaacgtttcaaagtttcatttcaaacatgaaaggacaataaaaaccaggaaaagtcaaattaggaatttctgggacacagaaaggaacattagtccacctttgcctccataactatctttccccacttattttcgttacattttgtcacaactactttctcagaactggttacggatctataagtaaagactaaccaagttcaaaagaagtcattgctagaagatatcatgattaccaaaataaaagtaaagcataatagttcgtgtttagtcaccaaatatataaaattattagttgtcatatggaggcgataagggacgttggatgatctccttatctaacagctgggaagaaaacctaggttgccacccagattcaggactaggaatcaggcacctcctaagatttctttcaaaatattattacttatcttctgaattgctaaaagttgtaaatgttagccgggcgcggtggctcacgcctgtaatcctagcactttgggagactaaggcgggtggatcacctgaggtcaggagttcgagaacagcctggtcaacatggggaaaccccatctctactaaaaatacaaaaattagccaggtgtgctggcatgtgcctgtaatcccagctactcgggaggctgaggcaggaggattccttgaactcgggaggtggaggttgcagtgagctaagatcacaccaccgcactccagcctgagtgaaagagcgagactctgtctcaaaaaaaaaaaaaaaaaagaaagttgtaaatgtttctaacatgatgcgtatgcatgaagacagactttttgaactaaaaacatgcttctgaaagaaaacaacttttaatgatttgtttttaaagtagttaaaacagcaatcttatttcaagggtttacatccaaaagaaagtctgttagcaaagaggacactgggtctggcaggacatggccacttaaagaggcagcccggcagatcagaggaggattttccttcttttctccatgtcatcagtgactacaaacaccactgagggccccaagggggaaccaggcagaaagcctggactgggataaaacctagcgatgggactccaggacagcaggacagtcagcagcaggaaaaaggaagagtgtgtgccacaaaacggagtcctctcctgtggtaaggcagggtcactcccgtgtaaggggccctggactgactgccctggtattcctaccattcccttcagccacagaccacagcctcatgtcctggccacgcacctaccttaactacctcatcccagaccttccaccatacaagcttgtgtttcagggctattattccctctgattaaaaattgtcttcaaatagttggctcttcgttcttgtcattcaggtgaccactccatctaaggaggccatgcacaccctgcaaaaatccttaacacatgccctgttttcctccacagcaccgctcagctgaaactgtgcgttcttttctcctcatctctgtgttgactcgtgtctcctctctccagaagaatagctccaagaagggcacagcaccatccaccttgcaaactgtggagtcctgggctccaagaagggcacagcaccgtctaccttgcaaactgtggagtcctgggcacctagagcaggttctggcattctagaggcggtcaataaacgtcaactaccagatgaatgaatgcatggaagggcattcacccaagccttctttcaccctctcaaatcttgcctctgtgaaattttccgaaagttttgctttcaaaggccactcgtgatttctccaaagcctttttccttccaggacctacagcaggacttgcagctgctgacctgcggcccctggagcaggcacacttgccactcttctccctcccactctcatttccccacaacctcctcctagggttctagactagtccaatacacgacttctccctgtggtcatggacccatcaaggatcaccagaatggagagcttcattctgctccctctggagttattattaatccttttgggtatcagagatccctatgaaaaatgtaaaagtggttaaattccctcagtgatccttccaaaaagattcagagggaatttttttttaatcacaaaacattgcatgtaatagttaacaaaactgagtttttcagctgtttttcaatagctacaaaacagtaagattgctacttcattaaatccaccgagccaacacacaggcattacataattcacttatccaaataattgaataagtaaattaacagtttaaatagaactataaacatatgcttacctactgaataaaataagccaggatttttcttgtttactgtatttaagaatgtattaaatctgtaagaaattcttcattacataggagtcttaactgccaactcaggtcattatgaactatgggtatttgacaatattaaactacattctcttgttgtttaatcgtctcatctagactgaatctcctctccaattataactatatccaatcccagatgaaggtctcactgcacagttataggagtgcttccgtgctggaccctgggaaggggatgctttagaagggccaggacagtatctgcgaggggctgaaggtactcttgcagatttcctgtcggctctcgtaggagacgtaggaccatgaactgtgctcctccccgggatgcacctgcctccgcccgaacactgccatgcacagaaaatggaactgacgctcggcccgttttcaacagaatgaaacagctaccacatttctttaggacactttaaataattaccatgtattttctaaagcaactaacattcctctcacaagtgaatgactggatgttaatcactaacttgggggataagagggaaaaaaaaaaaaacccaaactccctttaccccaccagtattaacgcagcacagtgaaacactttcagacacgtaatacaaacagggtaacaattgttttaatttaacaaatttaaacaaaaacggtcacctctggatagggcgtaacatattaaacagaggaggcgtggttttcatttgctactctgtttagttttgactaactggaaatgctcatctcttcttatttcggcaactccttttatgccacaaccaagtcatgaattcaggaaggaagcaggcaagtctgatttgtgcatgaaacattatctaaagggaagaaagtcagccagtgccctcgctaatcccttgggcaagaaaggtaaagtatacagccacagtctcaaagccagagtgacacaggagtaaccaggagcgcacattcctgccttatctggcgttactttgattcacctcacctttctttcatgacaggaagggcactccaagggcattacactgagatcaaacaaagcattccagaaaggcaaaggctcttctcacagggaaaggaagaataagtcttacatttcatgaatgaataagctgtaacgaaacatttctatatccttaaataaaatgtccaatagctgataggatacggaaccgtagagaacgttaaaccaccaccacaataagagcaacttagccaaacccctctatttttcagtaacaccataaaatatatgaaggttaaaaattcctatctcaaatgaaacatcttcactaagattttctaaaattcacagcagagtttctaaccagcatatgtggcctggggttgctttagtgtttctgattatattccttaggtaaggattacgcagtcagtattttttgactctggttaacttttcctttgactgcatctcagaggttcctttaacttttcaaagcacttaaccagtggttattttcaacctgcataatgctttctacatatggtattctacaattaaaacataactctgatttctataaaaccaacatacatttggttactgtaaaagacagtcaagacatctgtaagagactcgtattcccttcaactgaggtgagcattgctctctctactaaaaaagagaatactggcaggtcctgagctttgctctatctggtaggttgcatttgtagatgagtccgtctctaagcagccagcaagctgtaagcacaccggttgtgagaatctgtataaggaaatctacttccctcagttaaactctctacaccaaagtaaattcatcaacctcagattcctactctaaattcttggactctgactcacttatgacaatcctggaagctggaactcaaatatctatgggcagtcagcaaataaaggcctgaagagctgtaatcaaccaactgttccattaaaacagacaactactgtctggtttagaaaaataatggatttcttacttccagatgattaaagatgcattcatttggtactgctgcctttagaagagttccccatggtgcaggaaggcagaaagtttgtgcaccataattatttgagaattttcacccccccccgacattctgaagaaaacatgtagcgatttttttcctgcattcttcctccacattcatcattttattggtaaatcagactctatattgcagtttttatgagataccagaattatgtaagtatgcaacactaagctaatgaagaataaaatatgtgtcaatttttgaatgagtgttcttttttccaagggctcaatgaaagcatcttggcataattaaatcaatatagtaatctcaacatctgggcctgctctgttgaaatgcaaccctctgcctcaatacaaatctcattttaatatttaattattgaatctattgcctaaagtcagcaactttaaactggtttgcttagcgctgttttttttaagctgttcttttcccaactgcattgtgaacagaaccctgtgccttttatccgcctcatactcttttccaagttcttaacatgaattaatagctgccaaggaactgcttattgcctagtatcacatccttgataatgtgttctcagatgatcccatgaaacagtctatctgtttggatccaatcactacactgctgattatacactatggacacaggtgagtgaattaactcatagggatacttgggaaggaaaagagaacttatattcttgatttcaacagcaaaattacatttttaaatttaatttgacaagcctgatagcagcgaaaacgaaaaattcaactacttctgattttacgaagtagcatctggccaatgaaatgaagagtgaaagcatgttttacagtctgtccatccctcattagcctttatctggcatacaagagacgctttttaaacaattaattaatgtgaagaaataagcctcaatatgcactggggacaaagatcgagaaaaggtaagttaaatcagagaatatgatcccaaaaagttgggttataaaaatcagaatttttaaacacacaaccagaaccacagccacaaaactaacaaccactgtttcaattatgatagttccctgactgaattagtattttccactcataaatctgccatcattttgatttctgtttctaaatccaaatattcagtggcagcaagaatgcagagaaatgggcactcacaaactgctgatgggatgtctagttctcataaaaacaaacaaacaaaaaaaaagaacagcttttaaaaatttcattacctttcacccagcaatttcacttcctgttatttacgctaaggcaacagagatacacacaaacaaggaacttacatattcaaaaattgagtattactatacaaacaggatgagtgtcccaaatcaaaaaatctgaaatgctgcaaaatctgaaactttggagcaccaacatggtgcgctgggcattgtggatttcagatttctggatgtgggatgtcaactggtataatgcgtatatctcaaaatccaaataaatccaaaacacttctagtcccaagtatttcagataaagatgctcaacttctattagtctgtctctgtgctggcactctatattctaaaaatcacattctttaagaatacctaccaaccagaaaatgttctggatatagcagaaggcagtcaacaaaactacacgttcagtaaatgttttctgttcatcatttttacaaatcccgcacctggcactggaaaggcatctttgtgcaggtacatatgagttaggggaaaagttcaccagggttctaggtagtaaaattttagtcatgttttctcctttccagtagtttacattttcccaggcttctacaatgactatatactgcctttttattggaaataaagatcatttttttaatgaggggagttcgctaattctgtccaaatgctatggagactcaaagctgaaaaaaaaaaaaaaaaaaagccaacactatgtaatcatttccaaattcccttttcatgaccttaaatgggacttctaaagctaagcagatgccccagcaggaaataaatttgcaactcaacagaggcacccacagagatatggcaagatgcaccttcggtggctttggcaataatttcctttcattatgtgtgaaggaatcttcactctccagtgcttctcaagtcaaagagaagcctgtagaagttaataggtccttaatatgtatctgctccctgaactgattcctgttcataaggtaatcgcggaccccatgtggtcctttcacaggggcttcggcaaatcccctgcagtgagatggcccctgggcagctctgttttctgcagaccaggctgtgacctaatcaatagggttccaagcaagacaatccctacattcaacagctcggaagaaatgaagggggacgcaattcaagctttattgacgaattccatttacctgtcacaatgatggttcacccagcaagagtaccccccccgcccccccccaaaaaaacacacacccttcagctgctacagtagactttccagccagcagccggcacaaaataaacatatttacttaagcttcagtcacaactcttgacgtgaaactgatgaagcccaaatgaaacaggtgtatctgtgagatacaaaggcagcagccacaatgtggcagggtaggttttcataacctgtattcgtttaaacccaaggacacaaaaagtaccgcaataaatataaagcagaaaatcaccccagcatgcagatcccaaaatttacatggaaaattccataaacctgaaaatgacctttttaactctgaaaagaataaacaggccattgaaacaacagaaaggtcaagtttacagaaagcaactacttttcaaaaagaagtgtgaaaagcatgggttttgaattaattatacatgttagcaattgtggaagcccacagaaactttacagttaatgaataaagatttcacttcacttggaaatgatggacctggtctaaataaatcttttggaaaatcactctgtaaaaatatcactttaagatgtcatatactttcacataaagaagatttgtatcttgtacgtcaaatcaaattagaattatgctacaaatccaaattatgccccccaaaaagctatttaaatgagggaacttcaataacaaatgtttatcctcaaaaagacacatgatttactcggaattttacaaaagctatcactggacattttttttctttttgcattcacatccaatgacccatcatggacaatttttaattgaaaacaaagtctgattttaaattaacttctgggctgtttttccacactcattaaccaaagcgagagagagtccaagtcaaaagactccaaaatgagctcacacactcgcttaacatcacaagaattgcttcactgtaatatttttaaagccatgccaggatctaggccaccagcctcttcaacaaataaattttcagcaacaccagtgtaataggcttttaacatcctcattgaatgtccttagcccagggtatctggcacccacccacaccaggctaattcaacaggcagaactacttaactcttccacttcctttcccacaagggcatgcacacccgccacacgactcgactccgcacaccacctcacctgggcgatcaagccttgctttgttggtggtgatctcttaatatccagaggaaaattaacacaccatgtgactctttaaaaagactaccgcactcacaagcccattagaagatctcatacctactttttcccatcacccaaatgaagggaaagagtaactttcctatcattttttctcaggttttagtagccccttcctcagttactattcaattacattttccctatccctataggatagctacaaataaacaaaaaacatgttactgcattgcgttacagaaaagtgtagtagaattcaaagctgtatttctctaaaaagaaacattttaaaaagaagagcaaacacttgagactacagagataaattatacttgttaggcatgaagccgttatctcaagtttactattcattagaatgctggtaatcttaggacagttgaggaagtaaaaacaatcagaaacaaaaccattcccaccaaccccaaaagattccagcataggtaatttgcaaaaaaattataaccaaagtgaatgatcagagacgtagctctaggtcacttatttcgtgtacgtcattcacagaagaaaatctaatagcctgcacggtggctcacgtctgtaatcccagcacctggaggccgaggcaggcagatcatctgaggtccagagttggtgaccagcctaaccaacatggtaaaactccgtctctaataaaaatacaaaaatttagctaggtgtggtggctcacacctgtaatcccagctacttgggagactgaggtaggagaatcacttgaacccaggagttgcagtgagcagagatcacgctactgcactccagcctgggcgacagagtgagactctgcctcaaaaaaaaaaaatctagtagcccactatccaaatttaaagtcacaaatatctttaaggcagttgaactctacataagtctctaaacttgcatttgaaatggggctagtcgaaactgaaatttgctgtaagggtggaatatacactgatttaaagacttcataggaaaaaatgaatgttaaaggtctcattaatacttacgctaatcacatgctgtaattgtactttttgatatgttggactaaataaaatatattattaaaatttcatctgttatattcttttttattgtggctactaaaatatataaaattacaaataaagacagtactattgggcagtgctgcttttgacctgttatactaattcatttgatttaaaaaataacgagtaacggtaaaaagtggcagaatttgcacaattttgttaatataaattgtaaaaatcagttcacctttcacatatgagcacctgtatctaaaaacagtaaactttggaatatttctaataagtggtttcatggtctactctgggacatgaatcactgttgtgttttgttttagcttatacagagtacaccgtgctgattaggtgcctctagtgcagattcatctctaacaccaaaagaaacaatttaagacttttattctcttcgctaacatgatcttctatatactatatccaagacttactgtttatgagaatatcacattttaagtcaccatctctacattaggtttctaacaaagtttgtcaactaacttgttacagaatcttcatttcatttcatgagaaaattttttgttagaaacaaggccactgagccaggcgtgacaggcatgttggctcacatctgtaatgtcagcgctttgggaggccaaggtagtaggatggatcacttgagctgaggagttcgagaccagcctgggcaacatagcaagaccccacctctgcaaaaaaagtaaaaaaaattagccgggcatggtggcatatgcctgtagtcccagctactcaggaggctgtggtgggaggattgcttgagccccggagttcaaggctgcagtaagccctgattgtgccactgtactccagtctgagaaagtgagatcccatctctaaataaaaacaaaataaaatattaaaaaaaacagaaacaagacgattcgttctgacatttaatgatcactgaacctttctacaagcagtaaacaataaacatgtatgctttactgtggctactatttttttttacctataataatgattatttttatgtggttctttttctaatctctttgaggagaagaatggcagctgggacttactacttctctaaaaatctctgttaaagaaggccacaagtttgtttttcttcccccccatgtatatgtcaatgtgttcaaagacatccactcccaaaatttccaaacagaaataatgtcaaaatgcttagtgagtcaatacagttacacgtttctatttcaaatcctaagatttctatttcaacttaccacagagcactttcctattaactgttgcacatacgtcccgtaacaaacaactctaatataagctaaaattagcaaaatactaagtggtattaaaatacatcttaggttatttatttatttatttatttttttgagacggagtctcgctctgtcgcccaggctggagtgcagtggcgcaatctcggttcactgcaagctccgcctcccgggttcacgccattctcctgcctcagcctcccgagtagctgggactacaggcgcccgccaccacgcccggctaattttttgtatttttagtagagacggggtttcaccgtgttagccaggatggtctcgatctcctgacctcgtgatccgcccgcctcggcctcccaaagtgctgggaatcttaggttatttttaaaacttttccatttaagctgaaacttaagcagagatgtcagagggctgcatgaaacctaaagataccaaatcaacactcctatattctctcctcatttcggtgtctatttccacgccccccagtcttccatggacttccaattccatttccccaagtattccattctctacgggacagcaataaatcaatgagatagtttgtgacaaattaattagcaggaagtggtgctaatgagaaaaacgaacatctgcaggccaaagtctatcgtgaagaaccccttgctgccctttaccagacactccatctctccgcctttcactttagaaacacgataactggaattctccaattcctttgggggtaagaaacttcagagatctttgtgatagaaaatgaagtaggaagacgatggaggagcattgctttggtatcttcagacttcaagcatccccctggtatctctgcttacgttctagtttaaatggaaatgtgctaaaaataacttgaagatatactgtaatgccattacatgtttgaacagtatgacaaacttaaagtatcgttatgtaagacagaaaagttttaagaccatattgatattttcacaattttcacaagcctttatatagtaatgcacatttaacattcagaagggattccctcaaagggaaacgcaatcgggtaaaagtgcctctggaagtaggaacatgaacacagtactcggcagctcctctcagcaaggttagcctacctccctacctgtggctggatgaacgaactgtgtcacagcacgtgggagatgacagtggaggagttctgagccttggcccagcggatttgctgctttcctcgagcacccagaaccccgagaccaccatgtaaacgggtccaggacaggctgcgggatgatcacagacacagggcctaggagctgctgcctgcagcgaacacccagccacctcctgggagcagggccctcgagctcaacagcaactgatcaaacatgagtcagcccgtggaaaacagccaaggaaacacccagctgagcccagcccaaatcgcccacccacagaacggtgacccaaatgagtggaggctgttctaagctatgaggttttgggatggtttgtttcccaacaaaaggctaaatgccattctctgtaatttccttcacaatacttaatattggcccaaagacaataaaacgtttcagttcagctctggatttgcctacacttattccacttgagtttctcatgtatttcatctaacctaacagccatctccacattcctcacaagattcaacctctcccagactcaacctgcctctcatctaacccaaccaccatctccccactcttcacaacactcaacctctcccaaactcaacctgcctctcatctactaatccaaccaccatcttcctatttctcacaaaactcaacatctcacaagctcgacctgcctctcatctaacccatccaccatcttcctatttctcacaacactcaacctctcccagactcaacctgcctctcatctactaatccaaccaccatcttcctatttctaacgaaactcaacatctcccaaactcaacctgcctctcacctaacctaaccaccatctccccatttctcataacgctcaacctctctcaaatgcaacttgctatgaacagatttctactcaaatacacagtgaacaacttccacaacggtttcctttccttcctttaatcatcctaaagagttacttttaaatagaataatgaagttaactgaactagctactgataattttctatttatatgagtggaaggtttagaatcagagttcctaagtagcaagaagagttgacaaagaacaaatgagtttttaaaaaacttttacttagatgtagttactaaaataagaaaactacttttagtttacatacatattatttttcttaaaagagtctggtaactaactaaatttccccccattattcaaccaccctttaaaagaaagtgtttggttttaagtaaattgcacctctccacagaagtaaccaagacacttaaaatacaaaacaggctgggtacagtggttcacaccagtaatcccagcatttcaggaggctgaggaaggcagatcacctgaggtcaggagttcatgatcagctagccaacatggtgaaaccccgtctctacaaaaaatacaaaaattagccaggcatgatggcgggtgcctgtaatcccagctacttgggaggctgaagcagaagaatcgcttgaacccaggaggcagaggttgcagggagccaagatcgtgccactgcactccagcctgggcaacagagcgagactccatctcaaaacaaaaacaaaacaaaacaaaaatacaaaacagctttttcaaaggatagttgggtgagctcaatttaatccagaaaaccaacagtttcaaaaataatctgtgaatctctagaagtaactattttcttaagttttaagaaattcatcaataatgatactaacaaaaatagatcctactaatctgaacgttttttagagttcaagtttttgctgaataatgtgcaatggcaatggatactcatcttttatacttaaaacaaaagaaatacttttcaatccagaggatgatacaggcaatagcactactctacagcccaaggacacaacacgtaactcaggtatattcacctggaaggccagcctcagaatctagatactcaatctcacaaaggaggctgctcctaggtaagcaaagcagaaacaaagaggaacccgcattgctactaaactgctttgttgttcttattcttgtaattttggaaggtatgggagacagggtgtctcaagtggaagagcagccttaactatattaaaaaggacaaatttaaaagggctttctcaacaatagttatttagataagcgtttccctttagtattttgttacaatctatttccattttaaattttacgcattcaaccagtattggctggatgcctagatgccagtcagttcctaagtaagtgatacagacacggacagagtccagtttcagccttatattctggtggaagtcaaatgacaaaagcagattttttaaacatgctaaaataatttttaatatgtattatatataaaacacacacacacacacacacacacacacacacacacacacacatttttgagacggagtttcactcttgtcccccaggctgaagggcagtggcacaatctcgactcactgcaacctccagctcccagattcaagcaattctcctgcctcagcctctggagcagctgagactacaggtgtgcgccactaggcccagctaattttgtatttttagtagagacagggtttcaccatgttggccaggctgatcttgaactcctgacctcagatgatccgcccgccttcacctcccaaagtgttgggattacaggcgggagccacagcgcccggccataggccctagaacacttattttaaaaattactgaccttaaactctaatcttgatactttgtagatatgaaacttcgtgtgacttctttctgaaatcaacattctgccaattaaaaccacatatggatattactcatgttcatactttcctaatcagtttccatcttctaaatgagcttgccacactattaagaaaaagcacttccttttaaaattttttagatccttaaaaaataactgatttccattttgttgcctcaaccaacagactaacttggtatttacatgacaaacccgccttttttcacttaaatatgtaaacaccttcagctgggcaacaaatcgaaagaagaggatcatgggacaaacatgcacaggatctatgaaaagatgaacaccccctgagcaggcagctactcggtaccagccctgtgccaagcactgtgataagaggaacacggacgtctgagacagagtaatgtcaagcagccctaagaataaagaggcaagtaaaaaaattaatagaaagctaaaagcaaaccaggacccacaaatgcattttggagaatcttttaactaagaacttatggcagggctattttccatagaggtcaaagaacatacggcaagtccatttaaataaaaattctggactgggcacagtggctcacgcctgtaattccaacactttgggaagccaaggtgggcagatcacttgagatcaggagttcgagaccagcctggccaacacagcaaaaactcgtctctagtaaaaacagaaaaattagctgggtgtggtggtgcacacctgtaatcccagctacttgggaggctgaggcaggagaatcacttcaacttggaggtgcaggctgcagcaggcagagattgagccactgcaactcgactctggccttggcaacaaagcaagactctgtcttagaaaataattaattaattaattaattaattctgtctgccaagggagctaactttatcattagaggcctgagtttcctgacagattgccttaataagtaaaggaatactagtggtgtggcattaagggttttccatggtgagctggcaaaactaaagaccaaagcctggcctagaaagctgcttaacttaaacgaggtatcaatgacccttggacaacacgagtttgaactgcacaggcccatttacacatgaactcttttcaactgaaggcaaatcaaaaacacagtactcacagcacgcgaaagcgcagcgtctgtggagggccggctgcgggacctcagaacgcacagatgtgggtgtgcgcggacggtccagaaaccgatccccatgctctccgagggatgatgcacactgttcattatatctgttttatttgtgccgtatgcctcaatggggagacagaacatctgatgaaacaggtgtataaagaactacaggttcttatttcacttggaaacagccttgaatgacggtttctcctaaatcatttcaggcacatgtacaaatatatagaaaagtgacctgtccattgttaaggtttatctagctcatttataatttttatacaggttttatttctctattacattaagcaccatataatgtatgtagaaatacttgcaggttgtaaggcattataaaaatgcttgtcactgtcactgtcatcactgccatcatcatcatcaccattatccttacccgctggtcctcctttatgagaatttgtgaggactgacaaccctggaacctccagaacagaggatctcaaaaccaggattccaagaagacggtcagtgcatgaacacaggttcggcacttcactgagccccttggtattgaatcaaatcactgtctctctgaagaaagaatatacagctttccacagattctcaaagtttctgtgacgccaaaaccatcaagaaccacagttttggagcctacaaataggcgtccagggtggcagaaaagaagcttcgctcaaccttcacaactgcaattactgtgtgttacaatctatttgctcacaaaacaaatgagggctacttactgctctatcagccactgtgcttagaagagggtagacagatgattacgctggactgtgtccttgagttcatggagacggactgaagtcacagacaggccgcgcactgagtcatacactacaacagaggaacacacaggaagtgcccccgcagcgaagagaagcaaaggctacctggcttgaaggaaaggtttccccggagaccccacgatggcttaccaggccagcctaaccattatgcattgagtgcctgttatatacaccaagcattcaaagacttacgtgcgcccacaaagagctgacaatctagaggaaaggcgcgtgtaaataaacaattacactagagtgatactgcagtcatatgtttaagtacataaaagataagaaacagctccacgtaacgaagagggctgtcaagaaagctttattaagtagagttatgagataatacgagctgaccactgtatgcccaaaggcagggagacagaaaacggcgaggcacagaggggtagagggctgcacagggcaggggctgagggaccagggctgcacaggagccagtgagggaagcacgggtgatgttaaatgggagagcagggaggcctgttagggcaatgcggctccgccacggagagactggaccccgtgcgatgggagacagtgaaacgggttaaggaggattccgtgacagatgaacacctcagctcaagaatcacgtctgtattgtcagaatgcctcctaacgcatcacaccataaactacatcaactggcacgcgctactttcctttaaaaaatgcaacagaatatttcaaaattcaatggcactaagtcgacgtgcatcatatttccatcatttgtcgtgtttttataatttggcacagacatgaactccatgagcagagtataacaccacgtaattttactcactaattgtgacaatctagtgagacagtctatggaaagaccataaaatagggcctgtacacggcaagtactcactaaacgttaactataattacatgctgatgatgattaagaagaaaaagcttacctgtgataagaatatggttaaattatcacaaaccagaaagcagtcttcagaaactacataaatagctgagtaacttttattaaaaaaaaacaaaaaaccaattgatttaaaactaaaaagactgtattagtagactctccccaacatgaaatgagtaagacattctaaagaatcccattcaacaggttgagccactcggaggcctagcaatggaccgagttcaacatggtatcagatattcgaggagatatggtactgttgaactggcaaggcaagttaattgataagactggcccttgaagtatatatgtgaatagtttcctagacttactgtcactgctgtgaaactggagaactgccaattcaacaagtacaggcatgtgcccttgaacggcaatctttccaagtccatttattcctagtaacaaagacagaaaagattgcgctttgtggcactatgtcttgtatggagcatgcactatttataagcagcatggtctgctgtttgaaaaaaaaaaaaaaatgccagaaaggcaactgcaaaataacagtacacaaaacacacactaataaataaaaacgtgacaaatccagccctacgaactaaaataatccaaaaagtaaaaacaatgggaactaaatggtaagaaaatctccaacatttaaactaacacctaaagcttaaaatcttttcaattttcatagttgtacacggtaggtaatacggaaagaacagaccaggtattaagtgaacattaaacctctacacacacaggtcactcaacaaattacgaacacccaatccttaaacatccttaggacaaaaaacagttccctggcaagggggacggtgagtaagcttactctggctttcttgccccgtactagatggccaagaggacagctgctgatgccaaggcaccaaggaggacaaggcaagagaacgatggcctcatgtaactcgatgcagagggaggtacaaatcacgttagctttggcgtgcaggcctgaaagctgggacctaaccaccatcttaaacatggtttccacaagaaaagccttccaacaattaacgtcctgtccagttcagatgggcagcatttttaccgattaaatcacacttttacaactgcaaacacaaatatgacacctgtccatctcttcaatggccaatgagacaagggaagctacaggcactcacctggattcacccacgccttcgctggcctgatcttgacttgctgactgccaccgcgacggaattcaaactcctgtcctcctaattgtgctagatagcaatatgtcattcagagtaaaaatgctggaagattcttacattcaagactccttcaggaccaagcatcgaatctaggattcaaggctgcaacctggcctaacccagcttagcacagaaacccacttcactagtcgtttttgaacaggctccctcgcagcatccgtagatcattcttcaaagagtaagaggagtaaaatgcggttctggcacttagcacccaagaagtcttgggcaagttacttaacctctcattgacgtttcatcctgtaatgtagggataacagagtccacccggtggttgtgagaattaaatggactggcacacacagaatgccgggcccagtgcccggctgtgacactcagtgtcgtggttattactagactggtgctcaccaccagtgtcattaccactgacagcatgaggacaaagccggcctgtctgacgtaagctgtttccaccccacacctccaggtcccggcccctgcacactctgagaattacatcacagcacggtaagcgtcactgcgtgctgctccacaacgtgggacggccctgagtcacggtcccccgagttcccatccacagcctttccaggctagacttgttcagtcagtaacgcatcaacgtggtaaacatcatacaaataactaaagaaaagctgaatctctgttgtttttagtaagaaaatggaacttccttaggatttcgactagatcctattttcaccttaacatcttcctgcttcaaagaaggacccttcccctggtagaaattgttaccacgccctgcttgactcagaatcacacacacacaagatttttatcccagaacacagcaacaacacactgtggtaacatcatttctgccaagacacaacttccagtctccctgtggctgggaaacgagcttcttttctcttaagctttcctaggaggagaacataaagagccaagaggacagcagctgctgccacttcagggaggagccagcaacacaaaagccctttcaccagcacattttttaactctctgccgggcctcccacccgtctctaatcaagttcctgctgccaggaattctagccccagctcccacagggcatcaggtcccaccacagcaggccaggcttccagcagccacccagctctcagccacttgcagaccctttagtcaggatccggggcccgtcagcctcctccacattccttctcctgtcacaggaggacgtgcagcaggagcagggatcccaggatgtaagtaaaatatcctactttatatgaggaaaagggtttctaacttgaatgaataataaatagctgaaacattcagagttctgcagaaccagacagaagctccagaaacattttccctgactgaggtcaacaatcaggttagcctgggccggaattccgttccgttcccactgtagaaacgcactcacctgtgtgcacctaagccgggcggccaggagccgaccccacacaggtgacacagggatgaggccaggagccgacccccacacaggtgacacagacatgaggccaggagccgacccccacacaggtgacacagggatgaggccaggagccgacctccacacaggtgacacagacatgaggccaggagccggcctccacacaggtgacacagggatggtgctccaacactctccatcgtgtgaatgcagccattttctcttaagaaaaatgtcctcatttcccttcctgtatttcatgaatgctgacttaagttgtgacaacggctgtacttccatattaattcattcccagtcttttcatcaaaacgtaaatttcaatcctgaaaccaggattgggatgctaaaagtaacacagcagtaatatgtttagagatctgctcttatcttaatgaaaaacacgggctccccaaataagtagagtcagaaggggaaacactcgtcctgggctgctttgtatactaacattaacagccaaaaagagaaccaaactactctagactgaaggtcaaacacattccagggcgtcctgtacgcaatacacacatcagggaacagacctcaacccaacactgcttcaacaccaacttctattcacaatttctacaaaatcttctggccaggcatttttctagacattcccttagttttaaaaatgaacaaaaagctgcagcatttcattggtgctcaagtaataattaacttgctaagtacacatcagctaagaacactacaccaaatttattccacacacccacaagagggatgctccagattttattctgcttaaattacaggaaaacctgttgaagcttacaacaaagcaacagagaatggatctgaagtagaagagggggttggatgctgagacgcatggcaggcagaccgaaccctgaatgtgggattacacatgcttcaaagatctttactccgctaaacatctttgttaaatctactttataatcctcactgtagaccttacagatagcaatctgaggaggagaatcttaattagagctctggaaactggctctctaacgagaccgactttccaaataattgttcacatggccctctccccttccagacctcacatggaagggcagtcacgtggcatggatctgtcagaacagttcaccaacatccagaggcctctccaggaagggcagatgataccgtgagacctgcagagtccacgcccgccatccccactctgccactacgctttctctcgctgcaaagccatttgcagaacatgtacaaaccacggagctaagaacacagagctaacaggactgtccgtttggtgacagatttttaggtagtccatagaatttctacttctacaaaaacagaaaactacgtttcagaggatgtttccaatttaagcagatttaaagagaagaaaaggaaagatcttaaaatagaacttcattcagcttgctggataggttctctgttctgtgaaaagtatataaatgatacacatatttgactaggttgaaataggtaaaatatgacaaaaatttggttataatactcaaccaacactagtagctttaagtcaaagacaagaagcaaacagttacgtggacaggttgttggtccccagagccacagcactcctgcacaggctcatattaattagcgcaatattaaatgcccccgagttaggcaaagaagaccctggtggacatgggcaatgggcaaggagcgaagttccagcaagcaccagcctggcctgggccgggtgcacgccaaggcacaccaagctgtagtgcagtctctggcagcccccacgggtgttcctcaactgcccctccatctcttcacctgacacgcatctttccacacttccttcatgccctagaaattagttaagacacactccaagtgaataattagcatgcctaattttagccaacaaaatatactgatttttcctaaaggagtttctacactgtgataccaattgtcctgccaggaatctctgaagaaataacttgggctgataattcttctgccaaaaaatgtatcttgtaatgaatacgaggtccaatgtgtaaatattattctatcacttttgttcatttccaaaagcatataaacgtaagtctactgtacactacttactttctctgtaaagcaaggaccacagaataaatgacctacaaatttccagcttctctctcacctttaaatctcaatatttacacacagtttcttatatacttaccaaccacactgcccacaatcccaacacctccccgcctcccactaaattactactggaaaagtctggcactgccctttctggaaaataccataaatctattttgggacaccacctcgtttggctggttgtttccttattttttttttcttggtagtaaaaatatcccaatctcttaaatgtgtaggtgaaaaatactagtttcgaaatgattccttaaaaagcaacaataaaaatactcttcttcacttgaaagaaaaaacccaaaaggcagtgttcatacaaagtcatgaagagaatttaaattaaggttttggttccattttgtctcaactttaacttttaacagttctttataggcttttgaaacctactttggagaaggaaaaaaagtaggaataactgttcttcaaaaattttacaaaaacagtttgactcagcttcagttgttaaatttggggtatttttctatgttgaaacagtatttgaaaattctaacttatactggacagataaaatgataaaaaagacattctactcttcagaggattatcaaatgctgttgattatgctagtttctcttgaaataaactaattatgggtattttagatagtgatatatagtctgtagacttaatacataggccatatgctagtggcacataaccaacagagaaagaattccttgcattaatagaagcacaaaaaatatattacaacttccaaaataactttttttttttttttttttttgagatagtctggctctgttgcccaggctggagtgcaacggcacaatcacagctcactccagcctcgacctcctggactcaagccatcctcccacctcagcctcccaagtagctgggactacaggtgtaccaccaccccagcatttttttttttttttttttggtaggaacgaggttttgctgttacccaggctggtcttgaactcctggcctcaagcaatcctcccacctgcgcctcccaaagtgctgcgattacaggcgtgagccatcgcacccagcccaaaataatgtttttctaaacagcagttacatttttcatgtgctacacacctatcagatggcatggatcccagggtgggtgttgactgaagactctcttgtttttttgtgtgtgtggtattactgaatatataaagtttaaaggtaattttaaaaaggtcccttttaaaatgcacagatttataaagtacacatgggtgagattagtaaacaaattgagccccacctattgctgatgagtgctatgatcaccccttttctatttccactatcattctcagagggcaggacatgaaaagccaacacattcgctcatttactcctgcagtcttttaacactgattgaccagcttctatgtgccaggcactttttgctaggtgctaaacacagaagatgcaggggctaaaagcctgccccgaaaggctcacactccaccaggacatattgacatataactacaatatctgcgcagcaagactgaggtatgtacaaagtgcaacacacgcactttctagcttggactgctgccttggaggtcccggtttcagaaccttcagtattacaacaaagcactgctaccatgaataaacctaccacacgtcaggagttttcccgtgttatttcactttactctcacttaaaccttccggtatttctaagtgtccccatgtagaagaggaaaaagttagttctaagaagtcatttgcttgtccaggatcaccaattaccaactagaagagccaggattccaagccaggtcttctcagttcagcatgccactaccccgcctctgcctctcgaccaaaacctagacgaggtactaagtgaagaccacattagagaagttttggcacatcatctctgcactgggtaactttgccggtgtgcaacaacctctgaatggcacgccagatggtagcagtagttgttctaagtatgagcctgcaaatacactgactgaaaaaagttggaaagacttctcaaagtcagaacaaaaccataatgatgcttttgataatagagttcaaaatagagtttggagatcagtatcagtgataacaatttcaatgtatccctggtcttttactcactttacgccacttaaatcactcaggcccttttgtttccatcttcatggcttactacgaataaacacatctacaatacagcagccgggccaaaaaaaatattcacacgcacttctataccgagcccaaagagcaacagggaattttgaagaagctgccacagggcagatggttaaaaaaaaaaaaaaaatggaaaagggcatcaaatgagagcaataaaaacatatttacctgtctcttcacctattttgaaaacaccaacgccagagccatctctaatggagtatcggatctccccatctcttctggcgtcctcatcatgagccgacaccgtcattaccaatgaaccaacaggtgcatcttctttcactgtccccttttccacaaagctggaaaacacgggtgggtgcaggttctcattcacatcaaccacctcaacttcaacatagcaagtagaagacagagaaactggctttcccttgtctttggccctcacagtgagattatacacttgcttcttctcaaagtccaactgctggacgatcctaactgctccactgagtttatccacatcgaagtttccttctccgtggtccagaaggctgtatctcacctgaccagactgacctaaatcaggatcgtgggcttctaaccacatgatgacggttccttctggaagatcctctcggactttcacacgataattaggtggaataaatgtaggtgggttgtcattaacatcttctagtgatactttcacaacgacagtggagaacagctgaggctcttctctggcttggtccctggcctcaatctttaaggagtgctcatgctgcagctctcgatccagagggcgtgcgatgttaacaacacccgtcacgctgtcaattgaaaatgtgtctgtgtctgtaacaattgagtacgtcacgtgtccgttgggccccaggtctttatctgtggcttcaacctggatgatttcactatgtacctccttgtcttcactcacttccacaaaatagctctcctgtaaaaactcgggtggattatcattggcatcgacaaccacgacatgtagaagacgccacgcagccttctggggtatcccaaggtcatagacggtaatattcagggtgtatttgtctgttgtttcacggtcaagaggagataaaattttcagcattcctgtttccatatcaatcatgaagcaactatcctcatttcctccagaaacagcatagaccagttttccattgaagccagtgtcaaggtcagtggagttcatgaaaattacactggaacccacaggctggttttcctttacctgaataccagtcggaagagtgcttctaaactgcggtatgtgagcattgacagagtgagaatcgaagaaaatatcctccacctctccctggttgtgtaatttatttgcctgcaggagcttctctgccagcattttggcaacaccagtctcttcacactgcaagtttaccagcttgtgactggcagccactgttatgttgatatataatggtgtggcaaaattttctccatctgtagctgtgattctcagactgtggaaagacacctttgcacctaagccatccattagcgatcgctttaatgacaatacccccgagttggggtttaaactaaagaaatccagttcatttccagcttcaatctgatactgtaccaactgaagttcatctgcatcaatagcagaaacagtggttatttgctctcccacgcctagatctctgggaattgtcccttcacaatttattttctcaaacaaaggtgtgttgtcattcaagttattgagagtaattgtagcaaggacttcgacttcccggcggtacggcaagccccagtctgatgcacgaatcctcagagtataaacccgaggcatcagttcgtagtccaggttttctgacgtactcacggcaccagtgaaatggtcaatcgcaaacggcacatgatttaaatttgcgatactgtatgtcacgtacccgttctcaccctcatcagggtctacggcactcaggctcatgacagtagtaccaatgggcacgttctcatcaaaagcagctttgtacgctgtctgggtaaattcagggggattgctatttgcacctaagactttcaccaagaccttggtggacgcttttctgtcacttgttgttacttcaagttcaaaatgggctgcctgctgtcttttaactggttctaaaatagaaatgagaccagtgttgtaatttaaactgaatttagcttttccaggtgtacttttaaaaacatacctcaaatgggaataagcaggaatggcctttaccatgaccacaggtgtgttgggaggagcaaattcacttatttctgctctgtaaacatccttttcaaacttgactggcccggctttgaactgtggagaagtcacgtgaatgactttaacagaagagaactggggcggagttcctttatctttagcctgtagtgtgagattgtagccgaaaggatgactgtcccaatcaatgccaccgatggctttgactttatactccttactccctggaaaggacctcactgttctaaactgctggagaaggtcacctgccacgatgcttaaagatgctatgtcaccattggcaccctgatcgcagtcatccactgtcacaattgcatatgctgggtccctgtccagttctgatggtgacaatgtcactgctgttatcaccggagcacattcattggcctgttcgatgtgcaccgttagcttggccatgctgctgatgccactgctcccatacaacttcatgccacggtccgcagcgaggatttccatctcatagagcttggtctctaggtaatcaagtctaccagttaacactatcacaccactggttgggtgaatagcaaacatatctgttcgatctttaaaactgtagtaaaattccccgttggttcctatgtctgcatccgtggcgctgactcttgcgatactggtccttatagctgtgttttcaggtaaagaaacgctgtatgaggtgggtgagaataacggtctcaagtcatttgtatccagcacctgcaccctgacctttgttcgcgcctccacattagtatttttttcaagtgctttcactatcaatgtgtagtgatccttcacttctctattaagaatagctgtatttcctcctttggtccttattcttagaaagcaaaagtctccgagaatgtactcttcagctttgaacaggttttcactgtctccggaaacaattttgtaccttacttcccacgctggatgtgtaatgtaaacacccatcttgacaggatgccccacataagtcttagctgcagagttctcctgcacggtgacgttgtactcgaggtgtgtaaactgcagaggagtctgttcaagtcgttggctgccatcactgtctccaaaatgttggaagagaaggagcagaagcaggagcaaagccaaatgtctccccattgcttaactgtcgggaatctgaaacagaagaaatcagaatcgttaccttggggaaataaaacaagcaaaagtgtgtacattgttttaaacttctcattaaaaaaatattttccatacacatggaatataaataaatgcaacggtttgggatgtttttcatgttttccaatataagtatcaacattcttgtaacatgtctagaattattaagcttaacaaaaacttccttttcatttttgaacgacaaggtcctctctttcatatttaaacgactcaaaaatcttcatgagtatcaaatgaaaggctactaactgtaacaactaagttatatttttatatttaaatcgttaaggcaaatataagcaactgttaaaaattaatgaacattgtttacatttacttacatacaatgaattaaatgatcaaaagctggcaaacataatgcccctacagtattgtgagaatgcaaagcttctgacaactaattcagaaaaaaacaaaaaccagcagtggttttacatggcgctccataagaacagcttgtaatctcatttcaaaatgtatcctgaaattatattatttctgtataagaatggttaagttcactccctacataatgtaagggtttattgtctcatttcgctctatgtaactacttaaaagtattaaaataattatatcaagtataatacttatcagcaacataagccccaaagaaaggcaatttacaaaagaaaaaccagaattcagcagcctgatgtcaaacagcatttttcctctctaagtcagtgaagcaaactttaccaactatatcaatgttttatcaccactgctgtcaacaaccagttgttcacagaatgtctcctatcttcagggcatcgaacaacctgtcaccctgggcccctccatgagaagatgacacacacacacaaaagctaaatcttctaagctaacacacgtcaagggtcaaatcagtctattaatacatggtggcagactctgcaggacagtccctgggtgactggcggagaaaagagagaaactgaagaaatgaagaaaacgttgcctttaacaatgacaaatgggaaggtgggcgaagtccactgggctgaggtctggccagggaagcaggacagttattttcagatcaactgttcccctttgccaacaaattcatcttgtaaatcaacacagcttcacaaaggacagcactgtcatcttgcaaagtgactctcaaattaatattcacaaaatgtgaatgctaccagaggtaaatgaagagcaaactggagggtgggtttgacagcccagttgaaattggtacgacaacattaatttatagtatcttaacttagctactgccaactctgccccataagtcattgccttagggggaaaaaaagacctgatgtgcttaaagcaattaaagcttaattgatattgaaccacgttcaagttggccaccctaacttgttctttagctatgatgccttctcctctccagataaagtcagaaattagacagatttttggcttctaggagaacaattatcatttaaacaaaataagaaaacaattttctcccaaaactatctctttaagtatctccatttagtcaacagttctaatactcagggaaatttgaatattataaaataatcttgtaattttatcaaaacaaataaaaagttcaacctacaggtatggaggaccttatcagacagaaccttgcatggtgttaaggaataaaagacaaagatcccaatcccaagggatttacaaactagaaataaaaatacatataaagaggctggtcacggtggctcacacctgtaatcccagaactttgggaggccaatgcagccggatcccttgagctcaggagttcgagaccagcctggccaaaacatggtgaaaccccatctctactaaaaatacaaaaattagcaggatatggtggagcaagcctgtaatctcagttactccagaggctgaggcaggagaatcacttgaacccgggaggcagagattgcagtgagccgagatcgcgccactgcactccagcctgggcaacagagctagactctgtctcaaaaacaaaaaaacaaaaccagaaacacttggatgatgtttagcaagcagtgtcttttgttttaggagtcacattatgttttaggagacatttttaccatcatccattgtacaacaaaatattataccaggattctattgcaagtactagaagtatttttgcttaattctacgtataaagttatcatgcagccattaaaagatagcactctgtatgttgacatatgtctagctatataaactggaaaaacgaagctgatcctatttatgtttatttaaaagagaggagaaggggggtagatacaatgtacccacggatatactttaaaatggacagaaaagtctaggcagacaagcaactgttaacagtggtaacttctggagaaccggtagagaaacaggtagctgagggaatgattactgtggcatttttctctactgtggtttttttttagcatgagtatgtgttgtctttatcatccactcacccctttcattaattatttaattccttttacataggtttaatgagcatctactatgtatcaggtgcagttctagacgctggggattcaaaagtgaaccaaattaccaacaagtcctgatggaagatacatttcctggccagacacagacagacaagtaaacagagtatatccgatgctgataattaagtgctaaggagaaaactaaagcagggcaaagagagaccagggtcaggaacctgaaggaaaagagggaaccctaaatccaaagggtcagggcttacactagtgacatgctgggcaactcttagattctttggggaaacgtagagtgttcaatatgattcctggtccccaccagcatgaagcctgtggcatccccctcatcacccagctgtgatgactaaaaatacctctatctcgagacattgccaaacaccctctagggcagaaagtcacaccccgcagagaagcactagattagggaagccagaaagagaccacgtggctggagcacagcggttgagggacagcggtaaggccggggcacatcctgggagagaacctatcatgaagggggttctttttaaaaataaaccttattttagaatgcttttagacttacagaaaagttgcaaagagagcttcccctactgttaacatctcactttagtacattatactagatacaactaacaaaccagtactgacacatcatcaactacagtccatacttcactcaaatttgctcattttacccaaggccttctctccatcctagaatcccttccaagacaccaccttacatttagctgtcatgtctcctaaggctcctctggaatgtacgtttctcagattttccttgcttttaatgatctggacagtttccagaagtactagtcaggtattttgtaggatgtccctcaactggaatctgacgtttctctcctgattagattggggttctgttttggggagaaaagccacagaggtagagtcgtttccaccacaccgtagcaagcgggtaaaatcaacacgatttatcgatgttgacgctgctcctgaccacgtgactgaggtagtatctgccaggtttcctcacagtcaggttactttcacccctccctgtactgtattcttggtaaggaagtcactgcatgtagcccattcttaagagacagagagtttcgctactcaaaatatttataattcttctagaaactgatttgtctatcttcctccatttatttattcaattttttttcttttttagacagagtctcgctctctcacccaggctggagtgcagtggcgcgatcacggctcactgaagctttgagctttccgggcccccgtctcagcctcctgagtagctgggactataggtgcgtctgtagatttagactgacagaattttacatactcaggaaccaccagcacgcctggctcatgtttgtattttttatagagacggggtttcaccacgttgcccaggctggtctcaaacacccaggctcaagcgatctgcccaactcggcctcccgaactgctaggattacaggtgtgagccactgcatccaacctgaatctttttttttctcaagatccgtctggactcatggataaaggacaatttttaggactttagagtttagtatgaatcaaatgagaagtcccccagcggattctgaaccgaggagtgccacggtctcagtaaaatggaaaaacctgtgggcagccagggcagaagctggagggcgaccagagcagtcagaggctgcagccacaacacaggtggagcgcgtgtgggctggggcacaacgggggtggggggcagattgtgaatctatttcaaggttgcctgatgctggagtggggagagggagggaaaggaggagagaacagtaccagagaagatgccaaagactgctcagcgtagagaacaagggggccaggaaccgagagggagacaggaggagaagcagcctcagggagcagatcgggaggtcagttttggacagggtaagatgggaacagctacgggctatccaagtaaagattgtgagtgggcagcagatatgtgggagactccagccggcagatagaaatttgagagttgtctaaatatgaaagacggtatttaaaaccacagaactgaatgagatcaccaaggaagagagcaggcagaagaaaaaaaaaatccaagagcagaaccccaagatttgaagggtccaaacgggaggccctgacaggggagatgtcggccactgagggaggaaagggaaccacagcatagtggtgtgataagaaacagtgagtaaataaagatttttctacagctgaagcctaacattagaacttggagttctatataatataaatactcactaatccagctgggcgcggtggctcacgcctgtaatcccagcacttcgggaggccgaggcaggcggatcacgaggtcaagagaccgagaccatcctggccaacatggtgaaaccctgtctctactaaaaatacaaaaagtagctgggtgcggtggtgtgcgcctgtagtcccagctacttgggaggcagaggcaggagaatcgcgtgaacaagggagacggaggttgcactgagctgagatcgcaccactgcactccagcctaggtgacagagcaagactctgtctcaaaaacaaaaaaaaaagtacttgctgatgcgccacgctgcttccccctccatccccccaccagaaggctctggcactgttccatcccctaagacacacagaccatggccaacacgtcagactgctttggctgttctctccccatgctgtcccaggtgctcagtcccaccacagcccccaccaccacccactcatccccaactggattcccaaacatgcaattaccttccacatcctactcagcagttctcacgggacacaatacagctgggacggacttgtggaccacattcctaactgaaatctttgaaaaacctgaatgtactctgcaaacttggctaacagaatgctactgtgagtagaataaattattaaatgaaaaaatacactttttggaagacattgttaaccgtgcagtaatgtaaccaagaaccacgaattcaggtttcactataaaaaccaccctgatcaaaacaatggctgtggctctcatgcaaaacaaacagtaaagctgaagcggggagagactccaacaccatttcatctaaaaaggaccttatcgcctagactcctttgcttatggaaattaaactccaaagaccatctgagccaagggctatactttgatatttagaaggtgatcacactacttaaactcactgcaatttgggatttctaaaatgcattttccgaagccaaaacaaagagtgtttacttagtctagccttgaaggagaagggctcccagtctaaagcttaaatatctttagcatagatctctgaaaatctataaatacggcagaaaaataacttttgcagtaaaaatcagatattaatatcttcatatttcttcattagggagaccttcatgtaaaatgcttccatcaattactgtgactgcacattcttcacaaaacagaacacagcccctgtgctgaaaacctaactgcatatattcaagtgtttagatgacctcaagctcaagtcttcgaagggtttcacacgccacagagacaggacattaggtgagacacagcatcacacaatgcaccaattctgttaaacgccgcatatttattactgagcggtcacaattcttacaagcacaagtagtcattctagcctttatggaacaggacattattaaacttttcatttcacatgttatgataaaaacacaaaattattaagttgagaactctgtgttctccctcactgtgctcttctccactctcattttctatcaacatagtgaaagcgtcagtagaatttaactcatgattaaaatttggaatttcgagttcagttcagtgtcacatttttaaagtatttttaagagatctctaaattgcaagcatctttcttcccccgagacagggtcttgctctatctcccaggctggagagcagtggcaccatcatagctcactgcagcaccaaccttccaggctcaagtgatcctcccgcctccgcctccggggtacctgggcgtaccaccatgcccagctaattttttgtatttttgtagagatggggtttcaccatgttgcccaggctggtctcgaactcctgagctcaactgatcgacctgcctggacctcccaaaatgttgggattacagttgtgagccactgggcctggccggcaaacacattttcaaagcaggatcatgaagttgtcaagagattatgaattgtaaacgagtttttttgtttgtttgtttgttttggagacagtcttgttctgtcacctagactggagcacagcggtgcaatcgtggctcactgcaacctctgccttctgggttcaagcgattctcatgcctcagcctcctgagtagctaggaatacaggcatgcaccaccatgaccagctaacttttgtattttagtagagacggccaggctaatctcgaattcctggctgcaagtcatccacccacctcagcctcccaaagtgctgggattacaggcatgagccaccgcacccagcgtaaatggctttttaaaaatactgtatattaaaaagaatgttgaatgatttctaaaatttcagacattccaaataaaatttacaacaggaaaaaaaaaactctctatttttctagttcaattatcatagccatgtcggtacttttaaaagctttcatccttacactgaaatactaatgagtagatcctgtttattttctgggtgtacactaattcttttcaacccatcttcatatgattttcagcatgaacggaggaagctgtgaccctagaaattgagcagcagccttaggcttggtatatgtcatttaatcacttctgctaactccatttatatgttgttatctttgactggggctgcaataatctggtaactctagcaagacatactttaaatattgccttcacatgatcaaccaccggttccaatttaaccctgagaatggtctttactgacaatgacagtgtggaactacaatctggctttttcagaaaacttcaccatgtacatgatttaatcaatccaaaatagattcctgaagtgttcctgcccttaagaaagataaacagatgtcctatttttcaaacagcctctatataaaacctagttatctacatgaacctataaaacatgtctgttggcattacgaagatgacgggttctagttgttctgtgctcctgggaacgacaagacaggacaggtaggcagcggctgtgtgtctatttctggcagggtgaggcattcctgtgctattctcttctttcccctctctatatattccttatcctccaaccactttctcctcatccacattccaggacaaactttgcccaaggagaagctcaatggactgttgacctcttgtgaatggagatcatctcatctaatgtatttttctccacaaacagaagtaatttaaatgacatcttggcagagtagccaataatcaacaatggccacttcttccactcccaagttggtaagtaagactttattttatacgttgaattgggctccctgtataattagattcggtcaacccttcactaaatgacagaccaggaaagtgaatgttccatgtacagcaagaaaacggaaatcttcagggagaaaagtccatcttccctcctcctcttaaaatgttctcttcacctgttctctcttcttacacctcagaagagatgccacccaccctagctgcaaataaagatactctgataccacaaaatcctgcctcttctacagctcctcccactcctgacaccttgtgcagaatccatacacacacacaggttcttctcctacttaaaaaataagcttggccagacacggtggctcatgcctgtaatcccagtactttgggaggctgaggtgggcagatcatgaggtcaagagattgagaccatcctggccaacatggtgaaaccccgtctctactaaaaatacaaaaattagccgggcgtggtggcatgcacctgtagtcccagctactcaggaggctgaagcaggagaatcgcttgaacccgggaggcggagcttgcagtgagccgagattgcgccactgcactccagcctgggcgacagagccagactccgtctcaaaaaaataaaataaaataaaataaaataaacttcattcaaacctttgcttctttcaaacaaacactcttattcttctctttttttatactggcaaagatcgcaagaaaaggagtttcacagcaccgccctggcttccttagaactccctctccgccaaacgctgctccacagagatcctgcaggtccaccctggcagaacagccgttcccgcatcacaagctaatgtcaaaccaatgaccttttctcagtgctcatcctccttgatttcatgacacctttgacaccactcactcccctccccaacactcctgatccttcattcggtcacagagtcccccaaaacaaagaggcaatccacaggtatgaaaaatgaatgacaacattctcctgattctcttccatactcttttatactctacactgactcacctacaactctggcattacaaacttgtcttccaactcttcctccacatgcatttattaccacccttaaagatctcatctactctgcctcaaatcatgaaggatcagtgcaccaaatctgcaatttcagctctaacctctctcaaacacctcgtaacattcctcctaaaataccatcaaacctaagttatacgattggccttcactatataagagttctgcatccatggatccaaccaacctcaggttgagaacgtctttaaaataaacaataaaacagtaaaaatataaatagtaccccattttatatcagggacttgagcattctcagatttgggtataaaatcccaaacctcccttagagaccaagggacaactatatagacttttcaccctttcgccattgcaaaataacagctcttccagttattttccaatctcaccacttcccaaatcaaccaagtttgcaaactaacaaatcaaacaaaaaggaaggggttgggagaacatcaaatgtggaacctagctccagctttgtcactaatcaactgtgtgaattcaaggaacttgcttaatcctttcgactctatgtattcgagaaattgaaggatggactaaaatctttacagcctcctggctctcaaaccttcatttctcaaaagttatccaaacttgacatttctttctcaatttctcaaaatggttccctttgcatttctgctgctaccacctagttagaatgggtattttgttcatgcagagtattcctacagtcttttggtattcctgctttctgcccccaatcccagtcaacctattcaaacttctttgtgatattattctttagcttgaaaatattcagtatttccccttagcctgctaagtatatgattcttaaccttgcattaaagacctttgataatctaacctctaactaatttcctaatttcccaacactacttcttatttcaaaacaaaaaggcatacttcccagacttgcaacaagttcagtaaccaagctgtcttgagccaataacaccacctagtggtgaaggctctaaagtaatgtaacatcttgacctcttcccttccgaaagataatgcaaacattactattttctttgtttcctgccctccactcctcacatacagcttatttgttttcacctttctcttcaacgtttctttctttttctctctccttaacctctgcctcataaaaacaatcctcccttttttaataagattatttaagtcatagtcaagattctctatgttctacctagacaaaaaaaagaagccaatccttttcctaagataacatggtacggtgaggtcttcagaatttctctccactcatcacaccacaagccacactatgctttctataacttgctttgcacacatcatttcctctgcttgaattgttcccctctgattcacacttccctcagaactcacattatcctaaatccacctgccccagatcccccagctcactgaggtgctgctatggaccaccttgacctgaatggatctcttatcacactggtctataagagactgtgtacttgtcctctcccttatcagactacgagctgcttgagggcaggaaacacgatttgttcagcactagatgttgtgtctggcccaatgtttgacacagaggaggtccactattgttggattggtaaatggacagatgaataaagcgttaagagtgagaaatgtgaggcaggactgtgttggggaggggatatagagagggataacataggaaaataaaacatccatccttctcaaattaacagaaaatccaggcacaaccacgaggctggtaacaacactgcaggtggctgctctgtagaggactcatttccaatagctcagaaagaggtcaccacccaccttacgctgcctcaaaattggctatagataatgccagatcagtgtctgtgttgcagattatcacaaagctctaaccttaatattctatgaaggatacagattaaatcatgactaatatttcctaagcagtgtatagaagcctttattatttttactttatagacttatcttcacatacataatgaacccttggaattaagcaagaattcaggcaatgtatttaaatctgggacttacagtaaaagatgacttaaaaaacttaaaagagtgaaatatgcagattcctcatcagaatatatttttgaaatgaaaagttcccctcaggtatgagaaaatggcaacttcctgatcttaactgatgtatatcactcatttcaaaaactcttctccagtgtctaaggataaataagcacttgcaaactgaacaattaagtgagaccaaaagatagagtttggcttcaacttctacataatttggtcaaaagaacaattatctagcgcaaatcccactcataaagattaaacagcacatccagccttacggctccctgctattaaatcaggtcctttaggctacaaattatgccactgagacagaatctaatgcaataataatgtactaatttgatttggctgattgattctacgtaaaatcagccaaacttgggtggaaagcaagcgggtaaagtgttaaaacataatctctaagatcctatccacctctaacattcaaagaaacgactgcttcaaagggacctcaaagcaaagtctaaaggcaatggaaaggtagaggatgatcaggggaatgaaaacagaattagtttgtgcataatttttaaagatttttcttctcttctttttcttttcttttttttccccaggctgaattgcaatggcacgatctcggcttaccacaacctccgcctcccgggttgaagcgattctcctgcctcagcctcccaagtagctgggattacaggcatgcaccaccacactccgctaattttgtatttttagtagagacggggtttctccatgttggtcaggttggtctcggacccccgacctccggtgatccgcccgcctcgacctcccatagggctgggtttacaggcgtgaggcactacgcccggccataatttttaaacatttttctgttggcacctgtccggaccatggatttaaatgatctactaacatgatgagaacccaacggggatacttcaaaagagacaaatgaatatacaggtggcccgaaatgattttataaagtcctctaacaaccacacttctttccagagtgccaaagaatttggctcatttaaggtgttcatttttcaaaaaatggttatacaaatgcaaacttcattcaaatcaaaccttaccttgagcttgttaaatgccatgtttagcatcactcaaggcttataccaattgttgttttaaaaaattacatagtgctttaagtatttttacatcttaaatacaaaggaataattctaactgtggaatcagagctgtcttcctaagacaaaaagacaaagacaaatatcacaattaactattaactggagaaacaccttttcaaacgtccctgtaacaactggatgtgttggacagcataaccaaactcattaagaatagtgtgaaaaacatcaccattacctagttctcacacacagataccttcttaaactatcgaaacctgtatctgaatatacgaagcattaagaatctgcttttgaaaaggaaatgaatatctgaaggtcattttcttttcaatcttttctcatactaataatcactgttaatatccacttttaaaaaatcgcctctatcaggcacccgggaattgcttaacaaaagccacttaatgaaaccacagttcagacaaaaaaaaaaacttaactgcatagaaaatatttatgagtttactttcctaactcatacaattgcgtccttgtttccaaagccttgcaattcacatcagcgggaacaaaaaaatctaacacacagcagaaagctggctctctaaaagaaagcatttttttttaaaggcaatgaaggaccaaaaactctttcttttaaaaagatcttagaagttcctcctccagagaagacagaaaacactgacaaaccgcacattgtgcagatgttcagccccgaaatgcagcctcgcagcccttcactccgcagtccaccggttgcatctgcacctccgggcagcgctcctgcagggcgcaaacacccagagacccagggacccggcagccccgcgcaggcctcccgcgtgcaccgctcagcgagcgggtctttcgcagacggcgggatgccccaggagaccgcgaggccggcgcagcccggcgagctcccggagggaaggcggcgtgtcagaaaggatcggaccccagcaatggccccggatcggtcccgcgcggtcgcctccttttcccgctccgccgccgggacccccctagccagtgctgaatttcccaactgggaaggaccgagtcactccaccctccgggaagtcgcgcgctcatccgttttcggcagcgccggagcccgagccggggaccgggcggacacccacagagtccgcaccgcagcgcgctgcacgctctcgcccccgcccgccggcccgcgccccagcgaactaaccgcaaagttggcccgaagtggcgacggcgctctcgtggagctcacccgccgtctcagcgcgcccccgagcagggaccgggcctgccggggccctcgccgggctcgcgcgtccgcatggtacctgccgcacgagccgctcccgcgccctctccccgcgcccggccgcccagctcggcgccggcgcctcacgctccccgagcgcaggagatccctccgccccggccccgcccgccggcgccggcgctcatttctcgggcgcggaaactcgagcccactttccccggctgccggctctgggaccgcgggctcggccacgcagtcccgcccggacccaaagagccccagtccctgcgaacaccaggtccgtgctgggagacgagaaggcgcccagcggggtctagcgcggctccgaggggcagggcgaggcttgtgatgccgaggttagttacggccagccacaggcgctgtgcaaggaattggggaaagctccctgccaagaaagggaaacgttagcttagctaaaaaaaaaaaaaaaaaaaaaaggctggggcctaatgagaaagcttcccagaggcatccctttagcttttccatagccttctgggagcccctgaatctgcatttgaatggcgcggctctgggtccgcgaaggtttggtgggctgaagtcgtccttcaggtctccaaaggaatgcagctaggtcggaatctacttcctccttcaatccccagaaaatggaaacgcttcccccgcgacctttttctgccgagttagaccccaggccctccccgccgcgggcgcctggcctcccccgctgacaccccggacgcccaggcctgtgggacaaaaggcagtcgcggcgtcccgcgggcttcctagcccgggagtcggccccaggggccccaaagcgtgaccccaggccgacaactgcaagttcctaggcagaggggaagccccagcgccgagaagcccgctccgagaactccccgcgccgggcgcccagcctgagcgtcccgggcgcggagcccatccccggtgcgggcagggctccagccgcaggctcggcgcagggcggactcggccgaagcccggagggccggaggcgctgggacgcagcccggacaagagggcggacttgatctcggaaagtttgtgggactcaggcattttaacactgggaagacaaagagatccgatttccctgggactggtgaggggagcttggcggggaggggaacggcagggcagtcaagtgtgaaagagaatttcctgggttcaaagttaacgcagtcaccttataagccatcttagaggtgaccggaaaaaataataataataaaggtgtctagcaggttgtggctgggaaggaaaaataatgcctgcaagatgagtgtgccgattcgtagccctatattccctgcccaccagttggaatacacatagattcacacatccagcaaatgcaaactccatcatccaaagacgtgtttgtcccggccataattgctccaagtgcttacaggtcaatttcatacatggaacacctcgaaagtgggtgacctgatctccaagcccaaccggcttgtgccgcttgccgaattgtaaatctcagcaaaacccaaacacaccggaactccagccgtttcctgggagcgaggaagcgggagtaatgctaaaaggggaaaagaagaacagtaaaaaaagtacaaagataccattccctgacgtaaaatcacgggattttttttaaatggcacaagagaattcctggagaagattaccattaattaataagtaataacgcttcctagggcttactagatgttttacatctgtctgggaatcccgattttccaggctccctgagaaatctatctgcctggaagaagttgcacttcgtcgccacaggagccgccgagagccagggatggagatttcagacttaggactctgccacgattctactgatccttaagcgccaacagaacgaaatggacatgcctattagctaccacaaatcgaattattttatatgagagagagaaatgtggttcaagttccacatttgtcctttaaataatcgaccctccctaaccctgtccccaaaggctcgtggaaattagggagggggttggggagacggttccagaaacaaaacgctttcctccagcacggcctctacatccagtccacccaagctgatttttgtaactcatataaagaatgggcccgggtgggtggtcagtgaagactggggtgagcaagcgcccacgtcgccgagcgccggggaggtccaggttcgcctccgcacagaaccctgcaaggagcgcgcctcgccaggtgcccggactagagggcgctgcgcccctgcaaatctcgcggccccgatgcgccctccctaggcaccattgctataataagttacattcaaaataatgcacaaacagcatcgcctctcaagttctttttaacagtgctctatatgtattttatgaactcccaaagctatgcatacgaatctttcatcgccgatccgcacaaagccagagggatgcgcagctcctggagccgagaacccgtagggcgcacacgcttccccgcactcgcttagagccacacaccccacgtaatttcattaacgtttaaacttaaatgccaaaaggcatgcacgatttgaacaaagaactcaccagtctagccgagtcctcggccctgggctctaaagtcctcggcagctccgtgatcccctcgcggtgtagatatgtgttaagagccgggtttgaagtaccaactttgcctccccgggatcttcagcatgtccctaaccagagtgccaacgtccgtgccgccgggacccaggcggccgcatctccggaggcttccgaccagggcaaacttaagcaccaaacgcaggcgaaaagagagtgcgcggggccggaacgagggcccgggagcagccaagtttgtcaggacgtgcccaggcagccagccgccgagttgaggagttgcggccgccggctgcggcgactcgctgcctctttccccactccctcccccttggaggcggtgggggaggggaggtgacgtcagcgccccgcctcgccccccgccccgggcgcggacgggattctccggctgggcgcgccaccccgacagtggcagcagcggccgtggaggctgcgggggtcccggcctctgcggtctctctggccggccgcagctgtggcgcgggtgaaacgcccgccctcctccttcggctgcgtctcccgggcgccggcgagcgcgggcgttcctcgcactcagcgcctggagccgcctggagccccgctgcgcgcacttccccggctcgcggagcccctccggcggcgtttcccacgccgcggactgcaggtgatgctcttcctcttctgcagccgaaattcgtcgcgatgtgtcgcctgccagatttttgctgggcggaagcatgaacagtctctgcagactggcctggacgacttgtactttgtggccctccaacttctggatgtgaattttttttcacgacttattattatgctcttcgtggtctttgtgttgaaaatcacggagctgtatttttattttcaaattctttcccaatgctcctcttgtcttgaccgtactctgaagcttataaggttctgagaggagggggcgaagggataggggaggagccagttcctaatgtgtcttacaagtcatccctagtgataggggctaatacgcaaatcactgtctcctcctcgaaataatatccatttagataaatgcaaacactgttgaggtttaatttataaagaatgcgtcgtctttatgtaagtgtccagcctccaggaaaatatctgctgtggaatatatttttaatgccactaaagtaccaaaatacctccccgaacagcgtgaaattccgagggagccatttctgtgagttgacattgtccccagaagattgtcattaacattcaagatccttgcaaaagggggctgggggcggttctatcatatttgcatccgttggtataaatatgttgatcagtttagctggtcgttcttttacaaaggtcaagagcaaaattctgagcacagaggaaactgggcagggagctaaacagtaaggagagaacaagattaggtgattggaatgttgtgtgtgtttagccttgaagtcataacttgtctaaatgtcagtgtcctcatctgtgatatgggactaatatctgcttcatgtggtaaaaatgtattcatgtgtttatccattcaaaaaaaaaacatactgcactctacttgccagggagataacagttattcatgcaggcaaagcatttttactgagcatcatatgaagtgtctagcacgcacatagtaggtacttaaacaatattagttttcctgccctcccccgctcccttccctcacttcttggcagtgtctcagtttttaatccataaaatcagcatcatcaccactgattggagattctgccaggcaggtctccagactcaagtcaggtctcctgggctcaagagatcctcctgcccaagcctctccctcaaggtacattttgatttggaagggaggagaggatccagggagctaggacacggagggatataggaagggattttagagctcctgcagaccccgagggcagctagagggtgccagattcctaaggagggaggaggctggcttgagaggccagtctgtcagtgcccagcggacttctcctgcttccctgtttcaactacacaggctctctccttttgtgtcaatagttgaaattagaaattgaccacatattgcaagtcctcaaaatgattcacaataaattcaccccgagaggcttctcgctgaagtccatttggtttgctatactcactttaaagttgtaataaataaaccaaattacttaaaaaagataaaaatcacaaatgacaggaacttatgaataacaattgatgatattagtcaaaatagctggttttcaaagtgagatgggcagaaaacttttaacagaacctctagagctgtgctaatgtagtgggcagccacttgccccctgtggctacttccagttaaactaaattaaaaggcacttcctgagtctcaccagctgcattccgagtttcagtgaccatgtgtggctagtgacaattgtattgatcgcagcagatcaaagaacattttcgtcatgacagagttccactggacaccttggtctagacctttaaaaacactgctattttatggaaggctacatcaagcattaaaatttcagtgtgtccaatactgagtcacctctgaagtataagggaggacccagaatcatggaaggattcattcattcagcaaatatttatcaagtaccaacaatatgctgggtgaaaatatgtaagacccaagatttaatgaggtaggtgtgtttagtgattaagaaatattaacatggccttttagttgttttccgtctttgctgactcataaaaccaggggaaatcatagatttaaagcaggaaacaattctgagacattttttggaatagccctaggaccaaatacttctaagtaggcttgactgactcctggcatcccaccctctctgctgctttcactgctttctcatctgcctgtgtgcccattgcggcctccccttcctggaggtgagaggaaatatcagccctctccacttcccctgcaccttggaattattttaccctttgcattcaaatacagctcttctccggaatcagcttgtactctcagagggagccattagaacattagacacctggctgggcacggtggctcatgcctgtaatcccaacactttggtagtctgaggcgggtggatcacctgagggaaagggtttgataccagcctggctaatatggtgaaaccccgtctctactaaaaatacaaaaattagctgggcatggtggcgggtgcctgtaatcccagctactcgggaggctgaggcaggagaatcacttgaacccgggaggcagaggttgcagtgagctgagatggcgccattgcactccagcctggtgacagagcgagactccatctcaaaaaaaaagaacattagacacctagtcaatctgatgggaatcagtgctggttaactatgggtatgagtatgttataataatatccttccacccttcccagtgccttatagcaagggctttcttaaagctatagttaaaacatgaaatttctgatgccataaccagtcacttgggaaagtatttggaggtattacaaatcacctactaatggctaaccattaaaaaaaaaaggtacaaagtatactttcattttaaagacacacccatagtggagtagggtggccgtagacattctgtccctcaaatataagataaacatccccaggtggtttgggaacagatattgcaagataaatataatttttgtgatgctttaccagctcagtgattgaaagattctaaccttttgaacagtaggcaacaagtcatctggcaacttactattgaagctactttctcaatagaagtatgcagtagaaagagcattacacttgaggttagaagacctgttttgacctgttttgaatcttgtctttgacatatatagtttgaatttatttggttataactgaattttgggaatctcactttcctctataaagatagatctctaaaatggacacacacacacaaaatctccctcactggttgtgagagataccagtaaagaataattgtggccaagcacagtggcttgcacctgtaatcccagcactttgggaggccgaggcgtgtggatcacctgaggtcaggagttccagaccagcctggccaacgtggcaaaaccccgtctctactaaaaacacaaaaattagctgggcatggtggtgtgtgcctataatcccagctactcaggaagctgaggcaggagaatcacttgaacccaggaggcagaggttgcagtgagctgagattgcgccattgctctccagcctgggcgaccagagcgaaactccatctgaaaaaaaaaaagaataattgtaactacaatatcattagtctcctcaaatttacctactgtgtctcaccctgccactcctatctcagctatgaagctctgtagaaccaatggccagtaacatgtatttactgccagttatgctccggacttggttccaccttctttatatgcattatctcatgtcattcttacaaaatcctgggaagcattagcaattaatgccctaccccgattttacagatgaaaactgaggtttgaggtagattaaataacacactgggtcacctttcagactgaaccctaaggctggctgcctccagagcaaacactcttgcctgctatagtgcactagctcctcatagcctgcacctcatttgcacccttcaggaaccatgacagttttacactaaaggtcagcagtgttgtggtttaagaattggcctaggaggggagcaaaaaactatcaaataatagctgcaggaaaatgctctcttgtagcagctacgagtttggataaataattgtgtaaaagtaggtcctttaatcagagtgagaacatcagtgattgtgttcaggaatacatacataaaacacatccattacttgtttggattacatattttcatgtatatatatgcatactgttagacacattgcttttcaattcaaaaattatagtctggcttttaacttgtttaggctgaacagcagaaaaatacacaccaatgattctcaatgaattctgacaaggactatgtcacatgatttcatgatcagcatttcaatgtagaccttgcttttctctttcctggactggaaccactagtgttttgtttttttctctctccaattctcctttctctccatttctgttttacatatgacaacaagtaattttacccttggaatattccctctatctatacttctttactattaaatctcatcccttttcctggtagaattttttagtcacaaaagctaatcttatatagaaactttaatgaggtatggtgatattttctcagcatccattctctaacagatcatctatctaaacccatcagggtagttctctatttcttgtcatgggcatgttgatcaatggtagtcagtgagatattaaaggaagtttcttggaggtttctggaaaaaaaattcctccctcctaagaaagaatcacaagagatattatctgagaaagaagtttttagatacaaaatgattcagtcttgcagactattgttctatcataatggcagacaaaaataaggatgtcatggttgggactacaatagttatcttgattagtgaggatgaggcctaaaccaaggaaggcagacgaagggccttgatgacattgaatgaaccatccctgtaggccacgcaaactaaagatgtgttttttttgtttgtttgttttgttttgtttttaatgggagagcataggtttccatattgtttaatctgagttgtgttgggattagcattacttgcagttgacatcatgtatttcagctaagcagtcccttttaaaatatcctaggaattattttaaagaaaaaataaattgatgtacttcagctcattggtcagcaggaattgggcctaactccaatgataagattgaaggattcttgaagctttctcttaatggtgagtataccaatctgcttgggctgccataacaaaatgccatcgaatgggtggcttaaataatagaaatgtattttctgatgtttctgagggctaggaatccaagatcaaggtgcccacagtgtcgtttctggtgtggcctcttttcctgctttgtaggtggacacattctctgtgtatcctcacatggccttgctccgtgcctacagagagagcaagctctggtgtcttcctcttacaaggatacaagtcctgttggattaaggccccacccttatggcctcagttaaccttaattgccttcctaaaggccctgtttccaaatacagtcacattgagggttagggcttcaacacatgaactggggagatggaagaaagattcagtccataacagtgagaaagaagttttcagatgcaaaactattcagtcttgcagactattgttctatcataatggcagacaaaataagaacatgaaattttatttgttcaaccagaagatttttctctgctcccactgctctttcctcaagtacccaaaaccttctagtatattttccaattgtgtaaacgaactcccggaagtgaatattaaccaaactcagatatccaatacttaccagaggataaatagtcagctggaaacaccgactgtcagcaaatctatgaacatttggaatttgaatttctttgtacctgtaactgtcaatatcaaatttcgagtcgaaaagtgaagtcagcttatatttggtgatatggcctactttgttcacactttgacctttatttgaaacagaatcattcaaaaaaaattacgacttttgccatattggccgggtgcggtggctcacgcctgtaatcccagcagtttgggaggccgaggtgggtggatcacgaggtcaggagaccaagaccatcctagctaacacggtgaaaccccgtctctactaacaatacaaaaaaaaaaaaaaaaaaaaaattagctgggcgtggtggcttgcacctgtagtcccagctactcgagaggctgaggcaggagaatcgcttgaacctgggaggtggagcttgcagtgagccgggatcgcgccactgcactccagcctgggcgacagagcgagactccgtcccccaccaccaaaaaaaataaaaaagaccgtgccgagttaaggataagattctttaagtgggtttggttgttttgcatgtttaggaaggaacatcgtttgtccctgccccaccccatccttttctatgcaacaatttgtgaaatattgcctctcctgtgtggttaggtgtatgaaagacccagaacaaataacaacctttccctgattttttccctctgctagacatttgttccagagtagagtgaagctggaaaggcaggctatgtgttcagtgctactgagacagctgtaaggcactgcagtggggtcttacggtggggagagagactgggct

SEQ ID NO: 407 - DNA, 48139 bp, Homo sapiens
tcggaggtggaggtaggtggattgtgtcagcccaggaattagggaccagccagggcaacatggcaaaaccccgtctctacaaaaaaatacagaaattagccaatcgtggtggtgcatcatgcctgtagtcccagctccatgggaagctgagatgggaggatcacttgagcctgggaagcagaggttgcagtgagctgagactgcaccactgcactccagcctggatgacagagtgagactctatctcaaaaaaaaaaaaaaaaaagcggtggtggggtgggggcttactatgggcaagccatggcttgctcttcaggaaaaaaatcattgaaaaaatagaagaaatagactaataattacacaattttaaaaagtggaagaatatcaagtgaccatacatacacaaaaaggtgggggtgggggagaaaaaaaaaactgttttcaaaaatattctgaaattttaaagctttttattagagtataatataaagacataaaagtacagaaatcgtaagtgtaaagcctgttgaatttccacaaagccaacacacatgtctaacaaacacccaaatcaagaaatagaacattcagccccacagaagccccttccagtcattacccacagcccccaaggttaaacagtattttaacttctaactccatagattagtctcaccaggagttaaacttacagattcatctacattgttgcatgtagttgtagcatgttcattttcattgctgggtagcatttcattatttattttttatttttttgagacagagtcttgctctgtcacccaggttggagtgcagtggtgggatcacaggtcactgcagccttgacctcccaggctcaagtaatccttctgcctcagcctccctagtagctaggaccacaggtgcatgccactacaccatgctaatttttgtattttttgtagagacggggtttcaccatgttgcccaggttggtctcaaactcctgggctcaagtgatcctcccacctctgccacccagagtgctgggattacagatgtgagccaccacacctggccagcattttattgtttgaatacaccataatttatccattctactgttaatgagcatgtgggtttccacttaggagctattttattttattttatttattttttttagagatggactcttgctctgtcacccaggctggggtgcagtagtgcgatctcggctcactgcaaccttcgcatccctggttcaagcaattctctggcctcagcctcccgagtagctaggactacaggtgcacgccaccatgcccggttaatttcttttgtattttttagtagagacagggtttcactgtgttgcccaggctggtctcgaactcctgagctcaggcaatctgcctgcctcggcctcccaaagtgctaggattacaggcgtgagccatcacgcctggccagagctttttttgttttgttttgagacagagtttcgctcttgttgcccaggctggaatgcaatggcgtgatctcggctcactgcaacctctacctcctgggttcaaacgattctcctacctcagcctcctgagtagctgggatcacaggtgcccaccaccatgcccggctaattttttatatttttagtagagacagggtttctccatggtggtcaggctggtctcaaactcccgacctcaagtgatccgcccacctcggcctcccaaagtgctgggattacaggcgtgagccaccgcacccgggccggagttattttaaattttactactatgaacattcttgtgcatgtctttggatgaacatgtgtacaattttttgctggataaaaacctaggactaggattgctgggtcatagagtttgcattcagctcttagctcatattaccaaatcctatgtctttttaaaacagttttattgacaggctgggcacggtggctcatgcttgtaattcaagcacctttggaggctgaggcgggtggatcacctgaggtcaggagtttgagaccagcctggccaacatggtgaaaccccatctctactaaaaatacaaaaattagctgggcgtggtggcgggtgcctataatcccagctactcgggagattgagggaggagaattgcttgaacctgggaggtggaggtaacagttagcagagatcccgccattccattccagcctgggtgacaagagtgaaactctgtctcaaaacaaaaatcaaaaacaaacaaaaaacaattttccaaaacaaaacaaaaaaacagcttttgagatataattgacatactatacaatttactcatttaaagtgtattattcagccgggtgtgtggctcaagcctatgatcccagcactttgggaggttgaatcggttcgctcacatatgtccaggagttcgagaccaggctgggtgacatggtgaaaccccatttctacccaaaatacaaaaattagccggacgtggtgctttatacctgcagtcccagctattgtggagactgaggtgggaggatcacttgagcccaggaggcggagtttgcagtgagccaagactgcactattgtgctccagcctgggctacaaagccagaccctgtctcaaaaaaaaaaaaaaaaaaagtataattctatggtatttagtgtagtcacagatatgtgcaaccatcaccacagtcaattttagaacattttcattgcctcagaagaaactctataatctttaggtatctccctctccccaacccccccattccctcagccctaaggaatcactaattgactttgtctctgtcagtttgcctattatggatacttcatataaatggaatcatacaatatgtgaccttttggcttctctcacttggcacaatgttttcaaggttcatccatattgtagcatgtatcagtatcagtactttattctttttcatagctgaataacataatatgtattattatgtgaatataccacattttgttatctttttgtctgttgatggacatttgggttgttttttaccttttggtattgtgaatagtgatgctatgaacattcatgtacaagtttttctttgaacacctgttttcagtgatttggggtttatgcctgggaatggtattgctgggtcgtatggtaatttggtttgtcttattaaagaaatgccaaactgttttccatagctgctgtaccattttacatttccaccaacaacgtatgaagattccactttttcacatcctgagcaacatttgttatttcctttttaaaaaattattgttgtgggcgcacagtggctcacacctgtaatcccaacactttgggaggctgaggcaggaggattgcttgaggccaggagtttgagaccaacctgagccacatagtaagactccatctctatttaaataaaagataaaaaataacatttaagtaaataaacaaataaaaataatatttatggccagtctaattgttgtgaagtggtatctcatggtgattttgacctgttttaatctacatttccctagtgattatgatattcagcatcttatcatagacttatctttgaagaaatgtctgttgaagcccaggcacagtgacttacacctgtaatcccagcactttgggaggccaagatgggaggattgcttgagtccaagagttccagaccagcctaggctgcatggcaaaaccccatctctacaaaaaatacaaaaattagctgggtgtggtgacatgcacctgtagtcccagctactcagggggctgaggtgggagaatctcttgagcctgggaggtggaggttgcagtgagccgagatggtgccactgcactccatcctgggtgacagagtgagactctgtctcagaaaaaaaaaaaaagtgtcctttttgttttgttttgttttgaggcagggtttcactcctgtcacccaggctggagtacaatggcacgatctcaactcagtgcagcctcgatctcctgggttcaagggatcttcctgcctcagcctccccagtagctgggactacaggcacgtgccacagcacccagctaattttttatatttttggtatatacagggtttcaccattttgcccaggcttgtcttgaactcctggactcaagcgatctgcccaccttggcctcctaaagtattgggattacaggcatgagccactgaaccctgccaagaaatgtctattgaagtcctttgcccatattttaattgagttgtttgtctttatgttgttgaagtgtttttaatatattctgggtactatataaagtactcagatcagatataagattgcaaatacttttcacattttttggactgtcttttcactcaagattgtccttttatgtacaaaactttttaatttcaatgacatccaattatctatgtttgcttttgttgctgtgctttcggtgccacatctaagaaaccatttgccaaatccaaggtatgaggatttacccctatgtttccttctaagagttttatagttttagctcttatatttgtgtctttgatccattttgagttactttttgtatgtggtgtgaggcaaggttcaaacttcattttgtgtatgtgaatatgttaaagagaatattccttcttcattgaatgatcttggcaccctagttgagatcaattggccatagatatattgatttatttctggactatcaattatgttccattgatatgtttatccttatacctaccacactgttttgattactttgtagtaagttttaaaatcgggaaatgtgtgtcctccaacattgttctttttcaagattgttttggctattctgagtcccttgcaattaattccatatgaattttaggatcatccatattcatttctgcaataaagtgctgctggaatttccatacagattgcattgaatctgtagatcaattgggaagtattgtcatcttaacaaaattaaatctttcgattcataaacacagaatgtctttacatttatttaggtcttctttcatttctttcgacaatgttttatagttttaatttttatacttcttttataaaatttattcctaagtattttattctttctgatgcttcagtaaatggaattgttttctttcttttttctttttcttttctttttttttttttaagggtctcactctatcacctaggctggagtgcagcggcgccatcaatccaccttctggcctcaagctattctcccacctcagcctcccgaggagctgggactataggcacacaccaccactgtcagttaatttttgtagagacaaagtttcaccatgttgcccaggctggtctccaactcctaggctccagcaatcctccagcctcagtctcccaaagtgttgcaattccaggtgggagccactgtgcctggccagaattgttttcttaatttcatttacaggttgtttattgcaagtgtacagaaactttatactgatcttgtattagcaatcttgctgaactcctttgttagctgtcattgttttcattgatttcttaggattttttgtatacaagatcatgccatctgcaaataaaaatagttttactttttactttccaatctggaggccttttacttctgtatcttgcctaattgccctgactagaacatccaatacaatattgaatagaagtagcaagaatgggtatgctctaatcttagtgggaaagcatccaatctttaactattaagtatgatgttaactgagggttttttatatttgccttttatcatgttgaagaagttcccttctattcctggtttgctgagtgttttttgtttgtttgttatcatgaaggggtggtaggattttgtcagatgccttttctgcatctattgagatgatcatgtgttgttttttattctaccaaaaaaatataatgcaatacttgatttttgaaagtaaaccaagcttgaattcctggaatgtatcccactgaggcagtgtatacttctttttatatgttgttggctagtattttgttgagtatgttacatccatgttcataaaagaatattggtctgtagttttcttattaggtcttattttgttggattttaatttcaaggtaaaactagcctcacagaataaactagaaagcgtttcttcctcttctatttattgaaagctttttttatagaattggtattaatttttttcaatgttttgtagaaatcactagtgaggccgtctgagacctgggcttttctttgtaagtagtttgctttttagtatatattactaatctctttatttgttatgtatctcctcagattgtctatttcttcttgagtcagttttggtatgtgtctttctaggaaattttatgtttcatctaagttatctgatttattaacatacagttgttcatagtatttctttgtgatccttttttatttctgtaagattgtaagtactgtcccatctttaatttctgattctagtaatttcgagtcttctttttttcttgatcaatctgggacaggtttgtcaattttgttgattttttcaaagagccaggatttggttttattgattttctctattgtttttctattctctatttcactaatctctgctccaatctacccagtttatgatattttggtatggcagcccaaatgaactaagacactctgtcacttgaaagacagcctgggagagtaggtatgactacaggcatggctcaggcacctaaagatatcagggcaaggatcacccaaacatccatcaaaaggaaactggttaaacccttcagtgaactacgatgcattattataaataatgaagtggatccatatatattaacaggggaaaatgcccacgctctattggtaagttaaaaaaaaaaggaagttgtagacagtgtgaaaatatagtcccatttttactttttaaacagaatatatgttagtgtacagaaaaaagttggaggaatgtgtattaaattattgacaatgagatttttggagggtttggattttgaaggggtggattacagatatacattatatatctataaagtatttgatatttgaaaaactgttatatctgcaatccaataaaataatttaaaaatttttaaagaagtggccaggcacagtggctgaagcctgtaatcccagcactttgggaggccaaggcaggagaatcacttgaggccaggagttcaagatcagcctgggcaacatagtgagactcttgtttctacaaaaaaatgaaaaattagccaggtgtggtggtatgcgcctgtagtcccagctacttgggagtccgaggcaggaggattgcttgaccaggaaagttgaggctacagtgaacagggattgcaacactgcactccagcctggatggcagagtaagaccctatctctaaaaaaaaagataaagaaacgaaggggagggaagggaagggaaagaaggggaaagaaagggagggaaggaaggaagaaagagaaagaaggaaagcaaaagagagacagtgagacagaggggaagggaaggggaggggaaggagaggggaaggagagagcaaggagaggggagaggaggggaggagagggaagggaagggaaacatagtctatggagtcgaacagatggcttttgaatcatggatctgtgaaaggaggggaaggaagggagaaaagaagaaaagagaaaggtaggaaggaaggaaaggaaaagaaaaagaaagaaagaaagagacatagtctatggagtcaaacagattgcttttgaattatgcatctgccaactaccagctgggtgatctctggtaagttgcttcgggtctctcaattttctcatcaataaaatgggggaattaataccagcctcataagaatgagctacctatctcaccagtttcatctcatctcatcatcccctcggggtgctctagtgtaggggtcagcacactactgcccttatagcagtaagggtctggtttttgtttgtttgtttgtttgttcttgagacggagtctcgctctgtcacccaggctggagtgcagtggcgcaatctcggctcactgcaagctccgcctcccgggttcacgccattctcctgcctcagcctcccgaatagctgggactacaggcgcccgccgccacgcccggctaaatttttgtacttttagtagagacagggtttcactgtgttagccaggatggtctcgatctcctgacctcgtgatccgcccgcctcgtgcctcccaaagtgctgggattacaggcgtgaaggggtctgttttcagaaaataaagttctggcggggcgcggtggctcacgcctgtagtcccagcattttgggaggccgaggtgggcggatcacgaggtcagaatatgaagaccatcctggctacacggtgaaaccctgtctctattaaaaaaaaatacaaaaaaaaaaattagctgggcgtggtgggctcctgtagtcccagctactcgggaggctgaggcaggagaatggcgtgaacctgggaggcggagcttgcagtgagctccacttgcaggcagagcttgcagatcgcgccactgcactccagcctgggcaacagagcgagactctgtctcaaaaaaaaaaaaaaaaaaaaaaagaaaagaaagttctattggaacacatccacagccatcaggatgttgtcttacacattgtctatggctgcttttgcacttcagcaacaaagttgagtaattactacaggaaccatatgacctacaaaatctgaaatatttactctctggtcctttgtaggaaaactctgccaacccctgctctaggaagaatatataggccttctttcacctcctaaaacatgacacattccttctcaccacaatacctttgaacatactgttccctttgcctagaatgacattcccacatcccatatctaatcctttcctgtcaatcctattcattctcatgaccttctcagggaagcttttgcggatcctcaaactagattaactttcttgatatacattctcttagtatccctcatagagtttattgtgatggcaattacccgaattatctgtgctcttatttctttaacatttgactgccccgatagactgcaaacccattaaaaagtctgtcttggctaggcgcggtggctcatgcctgtaatcccagcactttgggaggctgaggtgggcggatcacctgaggtcgggagttcaagaccagcctgaccaatatggagaaaccctgtctctactaaaaatacaaaattagccaggtgtggtggtgcacgcctgtaatcccagctactcaggaagctgaggcaggagaatcgcttgaactggggaggtggaggttgcggtgagctgagatcacgtcattgcactccagcctgggtgacaagagcaaaactgtctcaaaaaaaaaaaaaaaagaaaagaaaagcctgtcttgttcagtgctgaatctctagtgcctaacaaagtacctggaatgtaatggatagaagaatgtatgcatgaatgatattatctataaaaggtatttattgtctgatatatactatatgacgtatactttataacaaagagttcaactaataggtgtggaattggttaagagcacaaattccagagttggacatgctgagatgaaccccagttcttccatttaatagatgaagaaccttagacaagtcccttaacctcttttggcctgtttcccatctgtaaaatggcaataatattagtacctacttcatgaggcttgtaataaagattagatgctatatattatagttattggtgttatgaattattattattggtgcatgtcttagctggacagatattattatgagtccttcaacgttgactccaggttactcttgaatcggttactgggacagggtgagccgaggtctcctctcccactcccactctcaacccagttaaatataaattaaaccagagccatggttaagcaacattctttctttaatttccctttgcaaatggaagcccctgagctggtgcccacccccacccctaccccataccctggggacccccgatgcaaggcccccacctcaacctggtgggaaaagaggagcaccccctccctatgatggtccattaaaaaattcctagtcatttaagaaatgaggctgggaatgggagaaaggaactggaagacaaggcccaggtcaggccagtctgaagatgttggggttgtgagacccttgagaagggtttgcaagcacatccctaagctcggggccagcatggctgaaggaggagaggtgacacacagacagatagtctgattcctcaaggtcctgcctgcctggctgtactgtagatgctgacactcaccaccaccaccaccaccaccaccaccaccaccaccaccacaggcctcctgatggagaattttccagttactctgggattgggtttgctaagcatcccctctggcccctgatctggggcatccctggggtccccctgagaccaaacctgggagaaggagggactctgggaacatgcaaagtgggggagcagagaccccgccccaccccgctgctctacaggatggtggctccagctgcatctgggctccgagggtccttaacagcgatgatgaagttgttggtccttcggctgccatggacccaggataagacatctactttctccacgtggtgacccctggcttccaggaactcaatctcttcctctgtgaactcacctgaaaaccatccccgacatatacacattcagaatgtacagagcactagttcaagagtcctacagtcagacctgagtcctcatcctggctgctccaccacagagctgtatgaccttggacaaatcactttaccttgctgagcctcagtttcctcatgcataaatagggattatatgagaacatgaagttgcagggactaaaggagataatgcacacacagcactgaaccttgcatacagtaagtgatcaataatatgcagtcattcttaatattgaaaacaggacaggccgggtgcagtggctcatgcctgtaatcccagcactttgggaggctaaggtgggaggatcacttgagcccaggagtttgagactagcttgggcaatatagggagaccccatctctacagaaaatttaaaaattagctgagcgtggtggtacatgcctgtagtcccagatactcaggaggctaaggtaggaggatcgcttgaccctgggaggcacaagttgcagtaaagtaagctgagattgcaccactgcactccagtctgggcaaaagagcaaaaccctgtctccaaaaaaagaaaagaaagaaaatggaaggaaggaagggagggagggagggaggcagaaaaaagaaaaaggggctttgtgggtcttcatctccacctgccaaagtcaagctgccatcattacttgccaggatttctgcataatccactaactggtctccctgcttccagccctcccttccttccttccttactggtctccctgcttccagccctccctccctccctcccttcctttctttctttctttcttttttttgaggcggagtctcactcttgttgcccaggctggagtgcaatggcacgattttggctcacctcaacctctgcctcccaggttcaagcgattctcctgcctcagcctccccagtagctgggataacaggcttgcgccaccacacccggctaattttctattttttttttttgtagaggtgggggtttatccatgttggtcaggctggtctcgaactcctgacctcaggtgatctgcccacctcagcctcccaaagtgctaggattacaggcgtgagccaccgcgcctggccccctgcctttcttatagcctgttcaaacagcagccaaggggatccttttaaaccattagtcagaccttgtcacctcccctgctcaaagccctccaacagcttcaacggaatttagaataaaatccaaagtccttaccaaggtgcctctaagcccaacattgcttgggaccttgctacttctctaaattcctcccctcatttccttctatttctcaccttgcttaactgtattccagccacattgacctccttgctgtccctttagaaggccaaacatgtttctacttcagtgcctttgcacttactgttctttctgcctggaatgctctcctagaaagtcacactgctggcccccttactgctatccagtctttggcacctcttcaagaatttcctccaccattacctaaaacagcagtccctaccatctttaccttgtttggttttcttccaaagtacttactgctacctgtatttgtttatttatttactgtgtctccctccactagattataagctttttgaagttaggaacgttgtcttgtttgctattgatctccagtgacagggtcagtacatagtaaatattgagcagatacttactacatagatgaacaaatccccatcccattggataagttcagaccctcatcatctcttgcctgggccatatcccagctgcttctcatatttccctgacttaaattctcctcccctcaatctacctcccctaaataagacaaatcaggtcatgtgtctccccttcccaactggataatcttaaggctgacctctgtgagaagccctgtaactccacatcctaccgcttctcaataaagatctagtcttcttctttccctaataggaagacttttggtagctcttgagatgaagacccaatcttgaatagcattaaatcacttaatcgaaaatctatttcctttgtggttcactttcaatccttttgattatggcaaggaacaagtttcagtctgctctctaacgcttcctaatctccttctttaatggagaaagcagtctcagagccttccatgggcaacaatatttaactaaaaactacacatatctatttgtatagctaacaaatagatgatagctatttgtcatctatttgtggcaaatgatgtcatttttccatttgtgattatgatataaggtctatttttaaaatacatttagggccgggcatggtggctcacgcctgtaaatccagcacttcgggaggccgaggcaggcggattacttgaggtcaggagtttgagactagcctggccagcatggtgaaaccctgtctctacaaaaatgcaaaaattagctgggtgtggtggcatgtgcacctgtattctcagctactcgggaggctgaggcacgagaatcacttgaacccaggaggtggaggttgaagtgagctgagatcgcaccactgcactccagcctgggtgacagagtgagactctatctcaaaaaaataataaaatacatttaggctaaaaaggaagttcatttagagagacatgttatgtacatattggtttagatggtgtgcaaatgtggcaaaagtcacaaaggtgctgggtaaattgagaactctaggaaacaacagctagcctcctggctgctctctgagccattcattctggtttttgcctaggctgttcctcctgtccagaatgtcctttacctccacataccaaattcctactcatacttcaaagccaagctacttgtcacctcctccataaagcctccccagggcctcaggtagatgaactttcccttcaccaagcccccactccttgtacctccatcttacactaaggccctgaaggcaggactgggctgagcccaaataacttagcacagagcctcacattcaacagagaccagcagatatttgttgaacaaaattcaatttcaaggatgtggccttgtcatctatcagctgggatccaagtgtcgctggccaaccacaggatgtgattgttgaagatcgcggtctctgcttctaatgtgattcagtccaggagatatcaagagctgtgcagtaaagaatagagtctttggtatcagccaggtgtgtgtcctaattgaagttctgccacttagtggttgatctttgactagtttataacttctgtgagcctcagtttcttcctctatagaatggggataataatattgaacaggcaaggactgtgtctcaatcaattctgtattcttttggactcgtgtcatattaatacattgtctgttataataaaaactcctcaaaggtgcagatactttcctgtttataaaattcagctgtgccaaaattaagcccttttcttagaggaaagtccgtctcctcaccctaaggtccacgatccggcgcctgcctgcctctctgatctaatttcatccttgcttaccttggtctcctttttagtcctcaaactcaccaaacccactcctgccctgagttctttgtacttgctcccctgacctacaaagctctgcaccaattctttgtatagtgggctctctcttactttttttttttttttttaggagataggatctcactctgttacccaggctgtagggcagtggcgtgatcttggctcactgtaacctctgcctccctggttcaagcaattctcctgcctcagcctcccgagtagctagaaccacaggcacgtgccatgcctggctaatttaaaaaaatttttttatagagacgggggggtggaggggggtctcactatgttactgaggctgctcttgaactcttggcctcaagcgatcctctcacctcagcctgggattataggtctgagccattgcacccagtttctttctcactctttagatctcagcttaaatgccaccaaagagaagtcttccttgatcattgagtccgtcctattatatcaccctgctttgacagttggcagagcatttatttgtctcatatttctttgatgacttattttcttgtttgcctgtaaatgcagaatccccagcacctaggatgatgcctggaacacgtacgtgttcaatacaaactgttgagtaaatgaaagtttgaagaatgaacaactgtgtcttattttacaaatgagaaaactgaggctcagagttgagacatggatttcccaaggccacacaaccaggaaatggcaagactggttccaatccccagatcgttcactgctccaatagaaatttgccaaataaaaccaaacttcactggcagttggtgctggttgaggcatgggcacccttgggaggagtcctttctctacctgtccctgtgcccgccccacgaggtctctgctctgcactcactgtccacctgcaggaggttggactgcaggtccgggtgtaggcggccgcgggccaggctgtcactcaggttccggttcaaggtcaggacattcagcagaacctgtggtagccaaggtacagaaaaatcagggctgtcccaggggtgatggtccaggattcctcagctctcacccttggtccaggctccttagtcttgagaattcttacaccgggtgtcatctgagcctcctaacagccctggaagacaggcaggcctgtgatgactgtttccatttcacagagagggaaagtgaagtccagcaaggaaaatgacttactccagagtttagaggaagccagggaagatacaccactagaaccaagtctctttaatctagcccggggctcccttcttttctctctggatagggcaaggttaatagctaggagtggtctagggcacaatgtgggtgcttttaacttagtggttaggagtgtgcgtaggctctggaaccaaactgcctccctgctctttctagctgaaggtacttgacctaaagtcttaacctctctgggcttcggtttccttatctataaaatagaaataaggattctctccagaactgggaaggttaaaatggttaacacacataacacagtgcccagcacttagtacgaactctttaaatgttagctattgttattatttccattttaaagatgaagagactgaggttcagagctgttaagtgaatgctccagcatcacacagttacaaattggtagcacttgggccggaacccaggagtgtctgattccagaacttaagatcgttaactcaccacctgccaaaataggtgcctggcatatatatcaggttctcaagacattcatggagccattctgaggtgttctggagaaaagcaggcccttcctttcaaatcccaccctaaagagggctggttgtctattcagatgctgggtagaggtataatgggacttgaggttaacagaacccaggccacccagatgctaaccccacttttcaatctactgaccctgccatttcccctgcaaccgggaaagacagggagcatcagggctccattttcactaagaaactcagcgcagcccatgtccacattgcccaggatgcgcctggcacaaaacagcctcagcccatgtttgccgcatgaggaatggaaacaagccacagatatgacaggcatctgcagtctaggccacagcttggctcccggctgaaaaaggccaaccatggcgtaaacctcacctgtgtcaggccgctgaggccccgcgcagctccattggcccccagagcgaggtaggttccacagagcccctccgcgggtcggaccactgtgggcagcaggaaagagagtggccgcttccctggctgcactgaattctcctgttgttagaggacagagaccacaaggggcaggtggggtgggacaagaccgggaaagggcccctccacaacccttccaactgctctccctcttctacatcttccacaggcccagttttcctgggagactggtcccttcccagacaacagtttgctatctgtgaaatgggtagggtgcctggatgggtggggtggatgggggagtgataagtacatccactgagctatgaggctgctacgggtcacaggagaaaggaccaagccaagaaagatggcaatggggaagaacaggataaccccaccctgatcatctctatgtgtctttgccctgctggggccccagatggcggggtgtaagagtgctgatttttaactagataaaaattattaaatccttcctccttgggtccctctttggtgcccaaccatagggctgagccccatcagctcaagctcacatagtcacagaccgctagtgctggaaaatgcccaaaacatcaaataggagccaaaaccctcattgtacaggtgaagaaattgcccagagagggcaagatcttcacaaggtcacacagtaagacagtgacagaatgggacaagggttcttcagacccaccaggctccatgtcccagacttagcagggctagggatgaggtgaacctcttctttaggcttccttatactagaagattctggagaaagtagggagaaaggggcagccatgccattgcacctcctacctataggcctcagggtccccaggaaagcagggaagcaaatcctaccaggctgggtgcagagtggttagctgtccggttgggccaggagaagtccagcatctggctgttgagcaggatccccgagggggtgataaggccgctgccaaagggctggttcagggagctgggggccgaggtggggttgggtgagccctggcccatcctcacctctacccagcccccaccccctcttggttcagaggatcccttgttccaggttctgagtctgagctggcatacctaaccatggccacaatgaagtcatcaggtcccatgatcagcacctgggcagccgtgggagctccgtctagttcatagacaggcaggagtggggcaggggctgcctgggagtcattgatatggccccggaggtaggcggcctccaccttgctgaaaagacaaggggtgggagatgagcaaacaacaggctctcaatacaccccacctacctcacttttgtggtgtttgtgtaattatttgatgaaatctacctccctcactggactactaggtctatgagtgcagaagctcattaattgcacataagaaatacccagaaaatagctgttgaatgtatttaggtattatttagattcttttctggaaccaacttttatttaatgtttaaatcaagagccttttagttatctgacttcttaatcctttctatgaaagtgcctggtgcataatggatcagaaaatatttgctttgaattaacaaactggattcatttaaactaatgtttgtagtctaaagttttattaagagtttagttgggggaggattttgtatatgaggattttttttttcttcctaatgagatagagtttttctctgtcacacaggctggagtgcagtgacgctgtctcagctcactgcaacctctgcctcccaggttcaagtgattctcctgcctcagcctcccgattatctgggattacaggcacctgccaccacacctagctaattttttttagtagagacggggtttcaccatgttggccaggccggtcttgaactcctgacctcaaatgatccactcacctcggcctcccaaagtgctgggattacaggcatgagccaccacatccagtcaggatctttactttcttttagagttttttcccaaggcacagagtaagtgctcaataactatttactggatgaactggttgaatagatttcatataggtgtgtgtgtgtgtgtgtgtgtgtgtgtgtgtgtgtgtgtgttttagagcaaagtttgcattgaccttagaaacaatatgtaatgctccagacttttaaaaattcaactgaggcgggaggctgaagcaggagaattgcttgaacctgggaggcagaggttacagtgagccaagatcatgacactgcactccagcctgggcgacagagcgagactccatctcaaaaaaaaaaaaaaaaaattcaactgagggtttcttacctaataactatgtgttggattatccatagctgattagagaataagttaccaaagattacttgaagacatttattcaattttcaaccaaacaaagctttacatgtatgattttgtttagtccttaccacaaccttacaaggttgataccattattgtcaagcccccttgtagaaacagatttagagagtttaaaccacttgcccaaggctgcacagctagcgaagggtcaagctggaatttgaatgaaggcagtctcaccagagcccacaagctactactatgttatgttgctaatgaagctgtattaccaccaccttcagtatttgcttggagactgtttgtttgtttgtttttggagacaaagtctcactctgtcacccaggctggagtgcagtggcatgatctcggctcactgcaacctctgcttcccgggttcaagtgattctcctgcctcagcctcctgactagctgggactacaggcacgcgccaccacgcccggctaatttttgtatttttagtagaggcagggtttcactatgttggtcaggctggtctcaaactcttgacctcaggtgatccacccgccttggcctcccaaagtactgggattacaggcgtgagccaccgtgcctggcttttgtttggtattgagctttcttttcctactcaaaaggaggagcagatgggcttatataggtgctatgctagcctcaaaaaaatttaagagccacatgaagtaagccaactcattgtgctgataggaaaggtgaggtgcagggagaggcacccagtgtcacgttgtgagttggggttgagctgaaattgacttaggatttcaggcctttattgctataccagctgcttttctcctgaccctttccccacacccaccgctgcctctgtagcccccaggtcctgcccaagacccacctgagcatgtcatccatgctctcagtgatggtagaatcatagacgggatctcccagtctgctggccagggctaatgcaatcttcagggtctgaaaatacagcagggatatggaagaggctgccaggcccctcccagaacccacacccagtggactttcgtgtgtgagaaaacttggaggggatttagtcctgccctatggcagtacccaatctccccactcctaatatccttaaatccagggaaaggcagacgggtcagccttacctctgccacccagtgaagagcctgttctcgggataccaggctggtgagattgaagccctccaggatgttgagagcactgatgagggcagggcccgtgtgcggaggtgggggactaagaaccaggtggcctgaaaggacaggaagtgactgatggcagggtaggggtcaaggcaccttcacatcccacatcccatctccacattccaccatcacacactgagaccactgcgctgaactccctcaccagatggggaaactgaaacattgagaggcaaagagactcattcaagttcacatggcaagtcaagggcagggccaggacttgaactcagaacactggtcttcagtttcctctgccatttgagaaaactaaggctcaagagggctgtggcttgcccagagtcacactgcaggctatcagcagagcacagcagaaacaggtgaccagatgttcatattcctggcctgtcatgtgtctccttttagctctcccataggccaggatattatccatgactcctgatggtctcatccagccccaaacttcttggcagcagcaaccttctcttcctattctgttactagatgtttggacatcaaaggaataatagctgatgcataacactaacattaactcatttagtcctcactgtggctactgttatcacacatatttgataggtccagaaactgtggtacagagagacaaggggaatccagagcactcaaggtactagcattgttgagacaacccaggctgggaaggggaaatggaaaatctatattcagtgcatgctctgatcagggcaacttcctacatcatctcatcaaatccttatgggcatcctaagatgtaggcactattattatttccattttaaggagggaaccaaggctcagagtgggaagtagcttgttcaaggtaaatggcacagttggtactcaaacccaggtcttcctagctccaacgctacgcttgttcttttttcttttctgtgtgtgtgtgtgtgtgtgtgtgtgataatggtctcactctgtcacccaggctgtagtgcagtggcacaatcatgcttactgcagccttgacctcccaggctcaagcaatcctcccatctcaacctcctgagtagctaggactataggtacaccaccacgcctgggtaatttttaaattttttatagagacggtgtctcactatgttgcccaggctggtcatgaactcctgggctcaagtgatcctcctgcctcagcctcccaatgtgctggggttataggcctgagccactgcacccagctgataggctctttccattgcttcatattccactgcctctggcagaggaatcaggttggagattgaggcctggaaagttgaactcagagaaaccctttcctggggcttgatgtgatctggctctcctagaagggaaagaacctgagaatcttctgagaaatccagcacctaccaccttgggttcagtaaacatggaccccacccatgtcataagcttggttttctgggttccctgttggttttcttgagtttggccagttgttatattccctcctcgggcctcaatttctttttggcactatgaggagctgggtctatgactgtcttgaaaggttcattctactgtgaagcttggatggactttgtcttaaaaattcttaggaagtacagggcagtgacagcgctgctggggaaagggcagaggcaacacagagcccaaatcaagaaaacctatggccagaaccccaacttccaggttggaccctttgaccaggtccaccccccaatatcctaaatacttggggtaactgaccccacagctacttttcagaaggtgggctgactctggtttgcttcaacagttgactgcccaggtagctcactgccttagtttctctcctgtgaaatggagaggagtctctaggccaaaacgatgtggccatggactgggaggcttctcctgaggggggaccctgggagccgggggagaggtcacctctgtacacgccacacacaggcttctccacaagggcgctgtaattgctgaagtcctcttcggttatgacaccccctgcgtgctgagcctggagggaagagaatgagggaatgacctcccaccactgtgacatggtggttttggcctataacacgtttggatcacagacagatcagctgtttataacttctgtgccttctgcaacccccatcgtggcctttagagaccccattatccctagacacctcaggaaaaaggaagggggaaaagcactaacattgagcacctatcatgtgccaggcatcacactgggtacattccatgaatgacctccttagcttgccattcaagactttttgtgatctggccccagcctacccctcccacctcatgtcctgctgttccccagtgagctctatgcagctgcagagtgacctgcagttcctgaactcatgccttcgtgtctttgtacctgctgctctctctgcctatgtaaaaggaaggttttctacttatggcacacttgcctaggagataccaaaactgaatgctgcatctcaccacaaccaactaaagccactagaaaaccatgactttgagtgatcctagaaggactgacccttattggacataaccaagccctcattattgaccaatgaaccaatcttgtacaaaccaatgggctcattccatcctatccagtgtgctgtcaaccctaaattagcataaccactctgaatcctttccttttttgtaccttatagtacttgaaacccttgagttatctatcttcagagaattacacattgattttttttttttttttttttgaggcagggtctcattctgtcgcccaggctggaatgcagtggcacgatcatggctcactgtagcctcaaccttcccaggctcagatgatcctcctgcctcagcctcctgagtagctgggactacaggcacatgccaccacacctggctaatgtttgtatgttttgtagagatggggtctcactatgttgcccaggctggtctcaaactcctgagctcaagtgatccacccatcttggcctcccaaagtggggattacaggcatgagccaccatggcctggcccatttgaattcttgagttcctttttctggcaagttaataaactcaactttgggtttctttttatcaaagatctgatggtctttgttacaatctcctgcattccctttgccacctccaggaaagggcacacaacccaggcctggccaattggggcattcccttctgtgccacagtgattgatttgggaatagtcatgaaacctatgatgagctaataagacacaacctggaggcttttgctggaactactgggaaggaaaaatgctctttctctgggatagcttgctggaaggatggcctgatatgggctggtggggagcaggtggaaaggatctgagagtgaatccaaacaaaggaaagtagagttgagagagagagaaagagaaagagggagagcaaatcctaacacagtggattgataatctggacacagaagaatctaaagccagtaatctcctggactttccagttaagtctgtttgagtctatcgccacatccagtgcccagcatagggcttggcacagagcaggcactctgtgaatgttgaatgaataacagacctatttaattcccacaactgtatggcagagacagatataatcatccccattgctcagatgagagaaccactgagttggtctatgcatccttaccatgaacttaattttccattaggacttttgcactattaatgacagttctcacatctgttactgcctgagactgggactctttgggattggatggtaaacttctgtgtcaatctccccagtcttgatactcaacaatgaaagaggtgcttccctcagtccctagaaaacccaaaagcagggaaggattgtgagcttagggaagctgaggccgatactgggtctccaccaggcctgggagggacatgacaagcccctgcacaggctggcatcacccctgagaagcccaaaggtacctctgaatcaagacagaacacttctggctaggcatgggggctcacacctgtaatcccagcactttgggaggccaggacaggtggatctcttgaggtcaggagttcgagaccagcctggccaacatggtgaaacctcatctctactaaaaatacaaaattagctgggtgtggtggtgcacacctgtaatcccagttactcgggaggctgaggcaggagactcacttgaacctgggaggcggaggttgcagtgagccaagatcgcaccactgcactccagccagggtgacacagcaggactccgtctcataaaaaaaaaaaaaagacaacacttccatcatcccaggaggtttttcatgtcatatcccagtcagctcctcccagccccaccaaccactgatctgatttctgtcactagaggttagttttgactattctagaatttcaaatgaacataatccacagtaaataatatagaaagaaagggagggagggagggaaggaaggaaaaaatgcggacgcggatgtcctgcaatagggaccttggggcatgcccccacccgcacaacacgagcacttacctcggccaccatctccagtgtgaggttgccacctgcgtagaaggcagccgggccggaggtgccaagtacatccagcacctcagccaggtcgggccgatgcagcaacgagccaggtagtggcgggcggcccgatggcaggaacgtctcccggaagcgctcggacatgttgggtggcagctgttcagccagggcacgggctaggggcagggacgggaggctgggcagggcgggacgccaggactggaccggatgagacgcgcaatagatggggtagatgggggctgagtggcccaccctaagtgccctgacccccaggagcctgttaagtgcgaggcagggatgtctaagggcccttcccagaccccctcgtttgaggccgcctccaggtgagggtgggataaggtggggagggggtctgaggagcaaactggaagagagggcctctctggcttgggctccaaatctcaaagattctacccttctccatcaacctcatgtctctcccaaatccccaggccccactgacctagatcatgagtcacgttgaagccatcttgggccacagctgctgcaaaggccaggacttgggaccatggcagcctgggggggccggagagcagggggtggaggaggtcctgggggaatgaggaggggtccggggggaggggggttcctgggaaggagagtcctggcaagggaaggggatattaggagggggagttgggaaaggaagaatccagggaagtaggagaaggccacccaaggagagatgcaaacgggggtccctggtccccagggggagggttgttacctgccatagagctggtgagcttcatgtagccccttcaccattccgggaacccccaccaagagcccaggctgggcaaggcgggtaggcgagggagagaggagaccaggtcactggaaggggggtgctgggctgaactccgcagagccccaagccagggatggctggcacaggggagagacacaggccaagtatcccaggggagggacaagctttcccaagcaggcacccctcccatctccctgacttcctatcagcaaatgcagaaaggcctcttttagctgccgtagttgggggatttataaattaagcaaaactcttttaagagccaggacataaccagtgtagaaagacacctgtctacattggatttcaccaacccctgcctttttttttttttttttttttttttcctgttacccaggctggagtacagtggcatagtcatagctcactgtggcctccaactcctgggctcaagtcaagcgatccttggtgcatgctactgtgcctggctaatttcaaagcattttttgtagagacaaagtctcactatgtcactcaggctggtctcaaactcctggcctcaagcaatcctcctgccttggcttcccagagtgttgggattacaggtgtgagccactgtgcccaggcaaccctaccttttaaaacggtggacaaaggaccttcatttaacctattcagtttcaccccaccattactctgagctctgaagactcaggggtgtgtttggcttttgccaccgcactaagtacccatttttccaagttattcgatatcttctttttctttcagcagacagttggtttacttctggcaattcccctctaatcttccaatatatcaagggctgggaaagttatagtcaactggctcagagtgagatgtgtgagtttcattgcatcaacttcgtgacatttcagggtactcagtagccttttttcttccttcccacgtgccagataggtaagattcccagagaagtaaggttccagattttctagttcattattttatcttgggggctgcctgactctctcatagcctaagagaatcctgctcaactctttttcccactcccctggtaaatacttagcaaattaatgcttgggttagcagaagggcaatgaagagagactcccctgaactctctcttctcaccagggtccccaccttggtctcccaggatctttgcagggtctcttccctgagggcccctggtgcggactcccggaaatcaattaggtggctctcatttcgtcggatgtcatgtaccagcatcacgcccccactgggagagacacagaaggggaagtgtgatgataacatgctacccctctgtacaatgaatctgctgcccctccacccccagtggtgagagctgtaggctcagtttttcatttggggtcaggtgtctgagctccctccccagcatggattcacagactcagccaccctaagaggatgggagcaaaaccaagagggttggagacccagggtccatggacctcttctatcctgtcactggagactttaatccctgattaggaaaagcccagagactggcagaacaggatgttctgccccatgcccccaccctggaccagagctggacccctgccagcttcctgcacctgtctacttggtatgtcccttgcccctcccccaggactggattatgtaaggatagaacatgcaaaaccaaaagaggaatttctttggtacggcttggagagctggtcttacaggagccaagataggaactttgtcagcttgttccttttctgtagcttatttacgtctaagatgggggctgcaaacttaaatgcccacagccaaatgacaaactaaggcaagcaggacagagaagaggaagtggtagaaactacggcaaactggacagtgcatgcccatcatgggaagcagcttctattccacgccaggtaacttcagccatgtgagaatgcgggcccaagttgttatcggatttcccgattgttcaagagatgttggaaatctggatttttatgaaaattctcaactttttaacaaaagcaaacaaaattttaagacagttcagtgtctaaaccaaaccagtctgtgtgctgggtgttgcccatgggtggccagcttgtaacttctaagagttcttagtgcagggtgtatttttggaggacagagggtgcaaggcttttcatcagacccatagggatttatgatcctagaagttgaaatatctctgccttaattgatgacagtatacctccacctgtgcatcttaatttatggtttacaaatttctttttctagttaaaaaaaaaaaaaaaaagcttctgaaaacactttcaggttttccataaggtagctttgctcttctgactccatccagggagaagggggtgaaatttggtgtagaaagagaaaatgcaaggagttggggcccaaaagcccctctccctaagttaggagtgctgcacatgaggcctacagacctggaggcaagaagtaggcctgggggaccccgacctccactgctccttacccgcccaggccagaactgtgtggagccacgatacccaaacacaaggctgctgccaccgctgcgtccacagaagatccctgtttactgagcacctcgatgcccagtgaagtgcagcgggcagcatcggtcaccacggcaccctgctggaagatctgggaggggaaagaggacttggtgggggcaggaggagctgtccacctccctagggcacctccactagccctagaactctacgcggcatgaaggtcgaagccctgcccccttgttgccttgactctgccctcattaccccaagtgcctcctaatggatctgtccttattcttccttgttctgtctccctcatgccctggagctcctctctttgggaccttcctctcccaagtcaccaccctctctccccttctaccactcagccattccccagtttccacagttcctcaaacattaccccactccccactccccagtttcctccccctccccatttgtccccctcacctgggggtccccgaagtagatctgcatgaccagcgccacggtgacaccggtagcgaaggtgagacaggccgtgacgatgaccgtgagcccatcctggcggcaggagcactcggccgctgcggcggagaacgggtctttgcgcgtctcgcgtagcggcgacccgtcttggctgcccatctccgacgacgacgatggcagccgctgcagccgtgcagacttcaggaaggagtccgggtctgcgggcaggcagccggggtcggtctgggcatctcctatctggccctgcccaccctccaggtgggactattcagcgctttccctgccccgcccctgccacacaatccccgcactggctagcactactcacctttcctcattttcgcgtgcaccccaggacaggcggggcaacggtgcccggctaggaagagacagggacctccccagctgggcagcagggaggctggattcccgcccctccctgatacctaggccaaatttcctggcacccagggcccagggctgagaacacttcctggggggtggggtgggggttccagccctcagtggaaatcggatcctgccccagttggggcccagccttccatgcaaggaggcagctacataaacagagtggagggaccctgccttccaacctcacttcagttatcagctcactcattccttaaatatggagagccctatgctaggtgccaggggacgggaacagatagttcctgccctcatgtggttcatagagccctggaagaaaaagccaataagcaaaggagtctataattacaagttgtggcaggtgctatgaagaaaaaggaggaaatgacagaataatggtggtaggggagggaggattccttagctgcagaaatcagggaaggcctctcaggaagtgacttttaagctgaaaactaagggatgagaaggagccagctataatgtagagcaaagagtatgtgtgtggaatgttctggaaagagggaacagtggatgcaaaggccctaaagtgggaatgagcttggcacattagaaaaaaaaataaccaaggcctgggcggctctggtgtagcaggcatggggaaagagtagtaagggtggaagctaggccagatacatactgagcgcagtggctcaatcttgtaatcccagcactctggggggccgaggcgggtggatcacttgaggtcaggagtttgagaccagcctggccaacatggtgaaaccccggctccactaaaaatacaaaaattagctgggcatggtgatgtgtgcctctaattccagctacttgggaggctgaggcatgacagtcacttgaacccacaaggtggaggttgcagtgagccgagatcgcgccacagcactccagcctgggtgacagagtgagactctgtctcaaaagaaaaaaaaaaaaaaaggaagatatgtggggctctactagcctggggagaagcttgggttttaccctaaggactatgggaggtcactactcgagaggctatttttgtttgtttttgagatggagtttcgctcttgttgcccaggctggagtgcaatggcacaatcctggctcactgcaccctccgcttcctgggttcaagcgactctcttgcctcagcctctccagtagctgtgattacaggcacatgccaccatgcctgagtaattttgtatttttagtagaaacagggtttcagcatattggccaggctggtctcgaactcctgaccccaggtgatctacctgcctcagcctcccaaagtgctgggattacaggtgtgagccaccgcacccagcccactactagagagttttaagcaagaatgtgaaaccatctgttctgtgtgttattgttgttgtttgagacagggtctggctctgtcaccccagctggagtgcagtggcaccatctcagctcactgaaacctctgcctccctgcaacctctgcctcccaggctcaagccatcctcccacctcagctcagcttcctgagtagttgagactacaggcatgccccactacacctggctaatttttgtattttttgtagagatgggatttcgccatgttgcccaggctggtctcaaactcctgacctcaagtgatccactcacctcagcctcccaaagcgctgggattacaggcatgagccactgcgcccggcctgttttgtgttttaaaatgatccctctggctactgtctggagacaaactggaggacgataagagtggaggtaggagagaactgaaagctcactatttgctggtggctatggacaagtcagtcaagtcatgcacctcaccttcctcattctagtaatggaactaatccctaactggtgggataggggtacaaggattccatgaggtgatgtgcacccagtgcactgtaggtactcactccaagttatttctattccttttccaccttgaccagggctgagaccctcttccatcccatagctccctcctctgagtgttattagctgtgaacccaggtccctaaatggcctaaaggtcctaggtgtttgtgaacagtaaagaaatagtctttactttaccttgacctcatgctgtactcacaatatgttttttaaagtttattcattcaatttttttagtacctgctactatgcactaggactataacccctttaaaagtctatgtgataatattaaaaactgaccattttattgttctgtttaaaatacgtggttcactgatgccaacataataaacatctaagctccttgtggtgtttaaagaccttcatgatccacagtcccatcttttgtgtaaataagaaaccaaatatatagataaaatgatgatatatgcaagaaatgtttataaattattacagaagttactcttgggaaaggatactgaagatgggaatgagatggggtgggagtttttttggtttgaaatttttaccacttatatctatttcctttttagaaatcaatacataaaccgggagtgctcgtgcatgcctgtaagcccagctattcagaaggctgaggcaggagatcacttgagtctagaagttcaaagctgcagtatgattgcaatatgaatagccactgcactccaggctgggcaacatagatagaccctgtctctaaaaaaaattaacacatatattttgaaatgaaaaggaaaaattacagggagataggaatgggaaaggggacttttttattcttcctcactattgctttttttttttttatcatgaacatgtaatttttgtttttgtttttgtttttgagacagagtctcactctgtcgcccaggctggagtgcagtggcgcaatctcggctcactgcaacctccatctcccaggttcaagtgattctcctgcctcagtctcctgagtagctgggattacaggcacatgccaccacgcctagctaattttttatatttttagtagaggcagggtctcaccatgttggccagtctggtcttgaactcctgacctcaggtgatctgcctgcctcagcctcccaaagtgttgggattacaggcataagccaccgcaccctgctgtttttaaactttattttcaaaaaaaggttatcttctgagactctccctcacttcataatgcttgcctctaaccctcaacatcagcatcacagagtctgtaaataaaactggaattcatccaaacaaacagacgttaaacacccactgtaggcacagaactctccttggcccctagaaatgtcttgttgttgttgttgttgttgttgctgttgctgttgttgttaatagagacaaggtcttgctatgttccccaggctgttctcaaactcctgagctcaaacaatcatcccgcctcagcctcccaaagtgttgggattacaggcgtgagccacagcacccggcattagaagtttcaaaagaagtgtgggaaagggttttgaacttatatttattgatgctgactacatattaagcattttacatatattcctttattgaagtgttcccaagactttatgaaataagtcccactctcgccactttacagatgagaaaactaagaccaagaaaggtgatattgcccatctcaggtcataaaatgagtaagtgggccaggtttggtggctcacgtctgtaatctcagcactttgggaggccgaggtgggaggattgtttgagcccaggtattcaagaccagcctgggcaacatagcaagactcctgtctctacaaaaaaatttttttaattagccaggaatggtggtgtgcacctgttgtcccaactactcgaaaggctgaggtaagagcatcacttcagcctggtagttcgaggctgcagtgagccactgcccaccagcctgggcgacagggtgaaaccctatctcaaaaaatttaaagtaaaatataaaataaaataaaatgaataagtggcaggaccaagagtctgtgtaactagaaagcctccttcccattgctccacatggcatcaagagccatttctaccctcagaaaccaaccttacaagctaatttttgttgctatttcttggtacttattgctttgtttttgagagataatcttcctgccaggctggaatgcagtggcgcaatctcggctcactgcaacctccgcctttgggttcaagcatttctcatgcctcagcctcccaagaagctggaattataggcatgcaccaccatgcccagctaatttttgtatttttagtagagatggggcttcaccatgttggccatgaggctggtctcaaactcctggcctcaagcaatccgcccgccttggcctcccaaagtgttggcattacaggcgtgagccactgtgcccggccctaggtatggtttaatttgttttctccagtcagatataaggatccaggaggtaaaggtgacatgtccctatcatagctattcaagactctctactccaccagtccatcataaagttattgatttatacaataaaaatatttactgagtacctactatgtgcactgtggaacagctagggcaataacagtgttgattttactgatagggaagagcaacagcaggatactggaaaaagattaatttgcaaccagaaggaataagtcttttgggagaaagatgacaagttcaattttggttattataaatttgtgggacaccataagaagctgtctggaggcagttggcctagtagatatctaatttttaccttcagggctcatccctggtatctgcttggataccacttctcattcaattttcttttaaggaacattctctctcctctctcagccaactccctcatccctgaccaaagtatataactcagacttggccagtcagaacaggtacctctgtgcagtaacaggcaatgtgaacaaagccaggccaataagacccaaactttgttattttgctggaactactgggaaagagaaaggctcctctttctattacacttaagttgctaagttggtaggatgtaagcctgtagctgctgggggcatcttgcccctaataaaatgggaggccttctgccaatgaagcccaccaaaagaaggcagagcaaaagatggagaaaagtccattcctttttaggtaccttaatccagctatgcctgaaaccccatatccctggacttttcagttatgctacccagtaaaattctctttttggatgtagctcagttaaactgggtttataacaaaataatcctgaacaaaattgattatacaagtccagagtttaggagagtgatcttggctagaggctagggtcatccctggcttgttgtttattcccttaaggggagaatcactaaaataaataaataaataaatatatatatatataaaattttgaaacagtgtctcactctgttgcccaggctggagtacagtggtataatctcagctcactgcagcctcaaccttcagggctcaagccatctgcccacctcagcctcccgagtagctgggactacagacaggcatgcaccaccacacctggctaatttttgtattttttctagagacagggtttcaccatgttgccccggctggttctgaattcctgagctcaagcaatctgcccaccttagcctcccaaaatgctgggattacaggtgtatgccactatgcccggcagaatcaccaaagatgtctgaaccagggagtgacatgaccagaagcgatggatggattggggtggggactgggcaagagggaggaggcaggaggagtagctagaagcctataaataatattgataagagaggttggtggcttagtctacagtggtgatgacagggatgatgagtaggaatttggaagatacttaggaggggtgcagagagcacttgatcaccatttggaaatgagaagaaaaggaggagtccagcatgccattcattattgggagactgggtgactggcagtgtcattaatggagaatggcagtggaggaagagcaggtgcatggggaagggatatgatgagttcaaaatagaacatgctatagatgaggcacttgcaggacatctggagacacaggcctgggagagaaaggaacacaagggcttggagctcagaagaaagaaagtatttcccaaccttggaatgatcactgtctagctctctttcccacagagcctgatgtggggtgcctggcacttgggtttagggaatggcaggctagaggctagctgggcacaaccaaggtcctggctaagaggatggtgctgtgccactagatggtaccaccaggttgagaacacaggaggccatgtcagcctgtagtctggtccaggtgaaccgaggaagccttggggcttggaagtaggattgggagatatggcattcaaatgattacactgaaatgatggcaacacacaaacctgacacataaatttggcataaggtataaactcccagaagctcagatgactaggatctctgctggatttccatacaggggtgagggcagagcctgtattgaacttcccaaaatactccctgaggttttggaacttgctctctcctaccattctttcatcctctctcctaccattctttcatcctgagatcttctctctcatgcatttattcattcaacaattattgagtgcccaataaataaatagagatgagggttttttttgttgttgttgtttgtttgtttttttgagacagagtctcactctgttgcccaggctggagtgcaatggcgcgatcttcgctcactgcaacctctgcctcagcctcctgagtagctggggttacagacacctgccaccaggcctggctaattttttttttttgtatttttagtagagatggggttttgtcatgttggccaggctgtttttgaactcctgacctcaggtgatccacccgcctcagcatcccaaagtgctgggattacaggtgtgagccaccacaccggccagtgtattttgttttgttttttgttttttgtttctttttgagactgagtctcactctgtcacccaggctggagtgcagtggagtgatctcggctcactgtaacctctgcctccccagttcgagtgattctcctgcctcagcctcccgagtagctaggattacaggcacccaccaccatgcccagctaatttttgtatttttagtagagatggggtttcaccatgttggccaggcaggtcttgaactcctgacctcaagtgatccacccacctcaggcatgagccaccgcgcccggcctatggataaggtcttgatgctggagaaaggagagtgaacaaaacaatcatgatccctgccctcatggggcttacagacagggagtaatcagataattgcacaaataaataatcatagattttggtaaatgctaagacatttacagagggccagaagaaaacatgtcaggcagttccaatctctaggtcaagagagacaggcattctctgttgagctggaagaggaaactaaggcccaggacagggtaggtgtgcctgttgtcgcttggtgagtcagggctgtattaggaccagaagtctcactcctgactactgaataaaaggcctagcttcaggctgatatccatcatgacacatcttcccactcctctccctgctacctcctgattccactccctttggaaaataagttttgatccgcagccctgacatttgacgcccataaacctctaaactccatcttcattatctcctcacccccaccccatacagagtgcagtccagtcaggttggcaagggctgctggtcagggccagatgaccagaaagtgtagaggaggagagaatttggggctttcaggctgggagcagctagggaagggccaagccggaaaagcagcatctgccaggctggtaagagacaaggctcaagtgcaggcactgcgaggaagcgagagtgaggtagaaggatgctctaatgccaggaagtgacgtgcagggacagagggatgggggatgaaggatgaagaatggaggggaggatgaagctgggccacatggctaggaggaagagcagcagggaaggaatgcacagagagctctttgcccccaggtctcttccaatccctgtctcctccttctcttacccccacttctcacaattccagcagagggctgaggggaacacagtaaaattctggagactgcttcctagggagcagagtaccttactaataccccggccagatccatggctcagggaggggtggggtaatccacaggagagtgaaggcgttctagtccccaaggacttttgagaggtcatgcagtccatgcctccgtctcccaacacccaacagaggggaatcatattctctttacccctccctagacatgaagagattctccgcttctcccagaccctctgcttctcacaatccctggctgtggggaacttctcttaaggcacagattggatccctcttgctgcagtctctgacttggtttctcctatcctgtcctctgtggctagagaaagccctcttctgggtgatcacagcggttccttaggatctccccttcaacattccttcatcgttagttggttcttcccagaaggtaagcccaatcccttctactgcagtccctagcatcctctccgttgtcgcatcctacgcctccaaggcagaaatgcacccccttcctcaccaaataattaacagagacaagggagaagaagggagagatccaagaagatggggatgaattaaggagatggagctggaggtggatgcttgacacagaagaaggaagaccggggacttcccaaggcagggcagggacggggtcagcgggcctcaccggtgtcggggtctcccagaaaggcgtcctcgtccttgcggcccctcagcggggccgcgggcgccggctcgtcctcgggcagccgcgggaagctggtgatgctcatgtagtccactggcgagtaggcgcccagggcgctctcctggctggcctcgttctccgccgccatcctcgcccgcgccccccagcagcgcagcgcctgccggaagtggctgcggcgggggagtgggagggcggagggcggggcctgatcttcgcgacagccgggagggggcgcctctcccagccctcggccgtgtcccggtctgactcgcccccgtctgctcagcgctatcagcctgcagctggcacacaggtgcgtgtagatggacagccaggaaggcagcgcagggtcgaggggagagcgcggggcaagcgagacttcagtggctctgcactttacgcagctcagggaccaaaccccttcctccttccagcctgaatacagctagtgtcctcctcaaatcccaggcttccttttcgggccccagaccctttcactgaccgcaaatccctctcgaccccagatcctgtctctgaccccaaactcctcggaccccagacccctccttgaattccgagatcctcctcctccgattttagactcctcctccgaccttagacctctttttcgacttcagactctgtcttcacccccaaacccttttgaaaaccccagcccatgcttcatctccaggcctctttgactgcagacgcctctttggacaacagatccctcctctgacctcagatcccttcccgcaccccgacacttctgactcctctttcaaccgcattctcaaactttagtgtgtgttaggatctttgaaagcggatccccagattccactccagagatcatgattcagtaggctgggatgaggtccttggaacctgaatatttaccatcattttaagagtttttgatgtggttctggaaaggacactttgagaaagaaggagtggtggtagtgatggtagggcaggagtggggcaaggtggggaataggtctccatattctggatgtctgggttctattctgccaccgctcaaacactgtgtaatcttgggcaagacaattagtctctctatcagtttccccatctgtgaaatggaaagaataatagtacccattttagagggttgtcatgaggattaagtaacagaatggaaagcgattagtatagggcttggcacctactcaataaatggcatcatcatcatcatcatcattgccttaatctggtagattcattccctccaaactcatccatcctctctccactccaaaattccaaccacactacagcttgtactacttctccatatccaaggatgagggaggttccttcttttacgaggtctctgttccaaactttcattgtgaagtccacaggaagagaggggggctggtgaagcctctatacacacatcctttctcttcccaaccccagaccagtctcagggatggcctgaagtgcttgaaaaatctactatatacacagcagctgcagtagcaactatagacaggagggggaagcagtgtgtcgggaacagctctggggtttgggtgtaggacttgggagagaggataggaaggagagggctactcagagctgtgtggtaagagtgcccagggagggtaacagtctatcaccaaaaagtgtacccattgtctgtgcctttccccaccccagagagttcttatctcctcagtgatgtttgtagggtctattacactaccctgaggtctaatccctctggtgggacccttccccacttgatgaggtctgcaccttctcagtgatgtccactcccacagtgtagttggcagctcctcactggagtttgagtcctctggtagggtccacgtctccttagtaaagtctatatcctctgtatctcttaggggaaatccatgtctcctcactagggtaagtgcccttcaaagccattcatgtcctattagcagggcccagggcccttcagtcagatctgagaacccccagcaacatctgtgctcccttagtggagtccatgtactgtcagtgaagtgtgtgtcccttcggtgcagtgaatatctcctttatgaaagtatctgaccccttggtggggtctatgtccaccccaagaggtctgtactccttcagtgggccctcagattcccgccctccttgggattgggcagactctcggtctcccatagagagattttttttcagcttagggtgtgcaaggtttacagtcagctgggcaaagtgcagggaagtagctgggaagggaggctgggctagatggggtcacaaggcctgtgtaggcttcaggaggtgggagctgcccgcttcaggcctcagaatcactcttggagttagatatttaagaatccttcctgccttgacagccagtctgtgaaatgatggtgaggtgggcacttctttgtggtgagtgcaggtgagagatggaggagggtcctgcctgacttctttctggggtggaggggctagagagaagctagaggtaattaagcccaggttgtggtggtggtggtgggggtttcccttggtggagtaaagagattgtgaaggaaagaagagaatgtgggccaggtgtggtggctcacgcctgtaatcctagcactttgggagcccaaggcgggcagatcacctgaggtcaggagttcaagaccagcctggacaacatggtgaaatcccatctctactaaaaatacaaaaattagctgggtgtggtggtgtgcacctgtaattccagctactcgggaggctgaggcaggagaattgcttgaatccaggaggcagaggttgcagtcagccgagattgtgccattgcactccagcctgggcgacagagcgagagactccatctcaaaacaaaaacaacaacaaaaaaagagaatgtgaatgatttttcctatttgcacagactttgatattttacaagccttagcttcaagcctgacgaggaagtaaaaccaaatctggagtcaaagaacctagctttggccctaacttggtcgttatttgctctctgactgtgcaccagttccttccctttcctgggtttgccatttgtgcaattaggaggtgggcttattacaaaaaacctgaaggtgtctcctagtcttcacttattgagtcttgtactttagatctggatggagatttgtgaaggcaaggagattgaagacatgtcctcataagagggagaaaatctgagctggttccagggtgagcagagaggaggtgctgtcgccagagcatgccctcaaggtcatgggagaagtttttccggaggacgagaatgtgggtgtggctcagagaggggggacctggagggaagggtgtcacctggaaggaactggtgatagtcaggactgtgcaatcagatcacggggcggctccgcgatggaccttactcaactcctctccttagtccatccctttccctttcgatccttgccttaacccaaccccttatctgtcactccaagaccccaccccactctggtcactccatggctctgcctcctctcctgtcacaaccagccgggttactccccatcactccatgggcccacctcctctcctgtcccgcctggccccgcccctcccttggcactccacggttccaccctctcccttgtcacacccggccccgccccttctgctttcactcgacggcgtcactccttccggcaagtcagctccacccctatccctcgacttttccttatagtatttctgtccttgccaacctcgatccctccccaaccagacacggccccgccccctctggcaccgcccacccgccagactaagccactcccccactcaccaggccccgcccctctacggaggccccgcctctagttcggcctgttttctcagtcccggcacccgccgcgaccgcaaaggcggccgcggttctaggaacttgacgtgatggggcttcctgaggagcgggtccggagcggcagcgggagccggggccaggaggaagctggagccggaggccgggcgcggagttggtctccgccgcccgaggtcagccgctccgcgcacgtcccctcgctgcagcgctaccgcgagctgcaccggcgctccgtggaggagccgcggggtgaggcccggcccgggcgggcctggggtgtcagtgaggagaagagtgggggctccctgggggagtcgggggctcccttgggaagctgaggggtgggtgaggagatggaggttctgtgaaggaagaattgcggttctttgaaaatggaaaagggattccgggaggagacgagggttccatgggagctggggagttccctgcagacttggagggtccgtggtggagatgcgggtttttgcgaggagacgcgggattccgtgagggaagaagtgaggttccttgagattgggacggggaggtcggccaagagagtgaaagtttcatgggaagagaaggggagttcctgaggcgaaaagagggtctctaaggggcgacgggagccttgaagggaggagggccacgaatagaactttctttgcttccctttcacaccagctcagccactgcctcctgagacccttaacctgtgaactgttgagggcaataacgggtctggttcccatcttggggtcctcagattagtaatggagtccccgatctatttttagtatatcggacatcctaatggaaattacgcggtataagactgaacgagttactacgatgtcaagttgttttatttatttttttaacttgggctgggattgtattagtaatagttcagaagttctgatagatggttccatgtctgttaaaatgtatgaggaaaatcggccaggagcagtggctcacgcctgtaatcccagcactttgggaggccgaggcgggcggatcacttgaggtcaggagttcgagaccagcctggccaacatggtgaaacccccgtctccactaaaaatacaaaaattagccgggtgtggtggcgggcacctgtaatcccagctactcgagaggctgagacaggagaattgcttgaacccaggaggcagaggttgcagtgagccacgatagcaccactgcactccagcctgggcgacagagcaagactttgtctcaaaaaaaaaaaaaaaaaaaaaaaaaaaaaaaggtataaggaaaatccccctacccttgccctcagtctgggtaaaggacagatagatagacagatagatagatagatagatagatagatagatagtttgttttgagacaaggtgttgctctgtcacccatgctggagtgcagtggcccgttctaggctcactatagcctgcatctcctgggctcatgcgatctttccgcttcagcctcctgggtagctgggactacaggcggacgccatgacacccagctacttttttgtattttttggagagacgaggttttgccatgttgcccaggctggtcttgaactcctggcctcaggctttcctccttacttggcctcccaaagtgctgtgattacatgtgcatgagctactgcgcctagccaaggagtcaaaattgcacccccattgggaggcagcatgatgtttggttgtgggacaaacatgggccacgaatcaaatccagaaaaatctagatttagaccctggctctgctgttcatttactgtggggtcttaggcaaatttttaagcctgtctgagattccttttcttccatctataagataggtctagtaatacttgcctaatgggtttgtatgaggtctaaagtgtgtaataagtatgcgctataacatgcctgatgcacagtacacattcaataaatagtagttagtctgatacaatataaatcaagcaattaccaagtaatgcaagacaggattcaatcaagtgtaaagtggtggagttgggatttgaaccaagacagtttgactgcagaatccatatcctaatagcaatgctattcctcttccatgaccccacagaatgcatttcaccaaattccatcaaatacagaatttctaccagggaagcagcctcctaatttgtcctctcttgcctagtttcgccaacttgagtctttccagtagatttatcaagacaccattagattgatattatggaaatatgctttcatatgtcactgcaaaaactttcaatggttccctgtttctggcagtttctaattaaaattctgcttttcttttttttttttttttcttttttttttgagacggagtctcgctctgtcgcccaggctggagtgcagtggcgcgatctcggctcactgcaagctccgcctcccgggttcacgccattctcctgcctcagcctcccgagtagctgggactacaggcgcccgctaccacgcccggctaattttttgtatttttagtagagacgggctttcaccgtgttagccaggatggtctcgatctcctgacctcgtgatccgcccgcctcggcctcccaaagtgctgggattacaggcgtgagccaccgcgcccggcctctgcttttcttttaagacctccagataatctagctccaccctgcctctctattcttatctcccactacttgctaccactcccctcattctagatagatcattctccttgatatcctggatacacatttattcccaccttcttgcctttgttcatttccttctgcttctctctacctagtcaaactccaccacttccaatagagcattcactgatcatcccaatttatgctcacctttttcctcttctgaatatctttagtacttagaaactatgccactcatccagattctgacacacacacacacacacacacacacacacacccctaccccccccaaaaaaacccagaaaaactaagtgtgcataaaattcagttttgtagccaaacatggtgacgcacgtctgtaatcctgctactcaggaggctaaggcacgagaattgcttgaacccgggagacggagattgcagtgagccaagattgtgccactgcactccagcctgggcgacacagcgataccctgtctcaaaacaaaaacaaaaacacctcagctttcttcattctttgttgatggacataaatgtggtttataaatagttttatatactatatgcctactattatcacttgaaaatatttttgagtatttgtactctcgttattagctgcgtggtccttggcagagtttcctgtgcttcctgagcttcagttttctcatctataaaattaggataattaatgtatactttgtaagaccataatgtcataaagattaaatgagattagtccagtccctgatacatgaatggcatttactaaatactagctctcatttgctttctctttaatggccatttattattctatggtattactacttgtattactagttttcatcagtttgttattgttgggctattgggttgtttccagtttcactattatagtgttgctataaacatctctttactaatcactttttttctttgtgattattttcttgaagtctattccctatagttgagatagcagagaaaagggtataaaaagttttatgggctgggcgtggtggcccacacctataatcccagcatcctttgggagggcaaggtgggctcccaaagcttgagcttaggagtttaagaacagcctgggtaatatggccaaaccctgtttctacaaaacaaacaaacaatgtgcgcctgtagttccagctactggtgggggagggggtacagctgagatggggggatcacttgagccagggagatggaggttacagtgagctgagatcatgctactgcactccagcctgggtgacaaagagcgagacaccgagctaaaaaaataataataatagaaattaaaaaaaaaaagttttatggctcttgtcatgcattgccttgcaatctaataagactgcgccaatttcttacaatgccattattgtgtaagagtatctgttttcccagggccacccagacattgggcttaataatttttttaaatttttactagttttctaggtatataatggcaccttggggttgatttaatttggatttctttaatacattacaacgttgtacactatgtgatttagctttcaattatattctgtcttgtacattaaaaaatatttcatgtgttaatcttatctctccaactagattgtataagctctaaattgtgtaacctgaaacaaatgacttagcttctatgaattttatttcttatgaaatgaaatgagggggtgataatctgtaaggttacttccattgttacggttctaattgcttctctttcctccaaatttttttttttttttttttttttttttgagatagagtcttgttctgttgcctaggctggagtacagtggtgcaatctcaactcactgcaacctccacctcccaggttcaggcgattctcctgcctcacgctcctgagtagctaggaatacaagcacccgctaccacacctggcaattttttttttttttttgtatttttagtagagacaggatttcaccatgttggtcaggctggtctcgaactcctgatttcaggtgatccgcccgccttggcctcccaaagtgctaggattacaggagtgagccacagtgcctggcatcctctaactcttgattcagtactcagactatcctaaattctctgcattcatatgttttacctgttgagtacattttctgcagaatagccaggcagatattttaagaatgtaaatttgatcatgttacttgcttaaaacccttcaatgaattttcattgctcttgggatatataccaaattccttattatacacagaattgcatgatttgcccagtttatgcatcaattcctgctattctttcccttattctcagtgtttcagcctcaaggagttcctcctaacatatgcccttggtctctttttttcatatgggagtggagaaaaacttctattcatctttcagattttagcaaaaatgtctcaaggaagtttagatcttgacttagtaattgtgtaaccttagacaagttatttaacctctctgagccttgattttcaagtttataaaatgagaaaagcctcccttctagagttgtggtaaggattaaatgagataatacatatgaaaagcttaaagaaacatttggcacatagtgaataacacttatataagtagaagctggagaaggagatgctcaatatataattgctgagagagaatgcacgaattaagagaagaaagagttggtcatggaaggttctgtgggtgaagaattttttctttttactaattacttcattaaaaaatttactttctagttagacagatggtgaaaaaaattgtacctgatttcagcagaactcggtgtgtacctataatcccagcttcttgggaggctgaggcaggaggacagctgagtccaggagtttaagacaagcctgggcaacagcaacaaaaaattactgattgcctattttgtgctaggcattgtgctagtactaggtggctctgattttaatagatggtaaaaagtgagtaggcagtcttgaggacaggaggaagaatttgagtcaagattcagcccaagagaatagaagatgggttagaagagtgttggctgctggccgggcgcggtggctcaagcctgtaatcccagcactttgggagtccgaggcgggcggatcacgaggtcaggagttcgagaccagcctggccaacatagtgaaaccccgtctctactaaaaatacaaaaattagccaggcgtggtggcacgcgcctgtagtcccagctactcgggaggctgaggcaggagaattgcttcaaccggggaggcagaggttgtggtgagccgagatcatgccactgcactccagcctaggtgtcacagtgagcctccatctccaaaaaaaaaaaagtggtgggtgctaagattagacaggtaaagaagggacccaggtggtgggtcctagggcaaggaagttataatttggtcctgtgtatagactggtaagccttctgaggctaaatatgtctcagaagattaatgatatctgggcttccatttctgttgcagaattctggggagacattgccaaggaattttactggaagactccatgccctggcccattccttcgg

SEQ ID NO: 408 - DNA, 79932 bp, Homo sapiens
gcaccccggggcacccacgtggcagagtggatcacgcagtgtggcaccccggggcacccacgtggcagagaggatcgctgcggagtggcaccccggggcacccacgtggcagagtggatcgctgcggagtggcaccccggggcacccacgtggcagagaggatcgctgcggagtggcaccccggggcacccacgtggcagagtggatcacgcagagtggcaccccggggcacccacgtggcagagaggatcgctgcggagtggcaccccggggcacccacgtggcagagtggatcatgcagagtggcaccccggggcacccacgtggcagagaggatcgctgcggagtggcaccccggggtatcagtgtgcaagtttaaccatttgagttatttcagtttctggtaattacaaataaagttgctatgaacattaaatatgggtttttgtgtgaaaatagttttcatttgtctaataaaagctcaggaatgcagggcaggtttaacttcctaaaaacctgccaggctgattcccagagtagctgcaccacttaccgtccccacctgcaatgcacgaggcccagtttctctaaatctctgctgactatatatatgtatactatatgtgctatatgatatacacgtatcatatgccatgatatacgtatattatacatcatatataaaaacatatttttatataaaataaatcagtatttttttatttcagccattctcaaaacaccaccctcacccgccgccaccttgtccgcagctctgcctggatgatgccgctggtgacagtaacagcactcagaggtgcttaacacataccaagtgctgcacttacccaactcccaaaaaagcctaaccaggtatcactatcatccccattcctaaaagagcaggctgaaaacaggttaagcccacagcaataagtggtagggcccggtgcgatggctcacacctgtaatcccagcattttgggaagctgaggcaggtggatcacctgaggtcaggaattcgagaccatcctggccaacatggtgaaaccccgtctctattaaaaatacaaaaattagccgggcgtggtggcaggcgcctgtaatcccagctactcgggaggctgatgcaggagaatcgcttgaacccgggaggcggagcttgcagtgagccgagatcgcgccactgcactccagcctgggccacagggcgagactacatttcaaaaaaaaaaaaaaaaaaaagtggtagggccgagacacaaactcacacaattggacaggaatccccactcaatcatcagaaagcacctctccgcagtgactaacagtctgacaatttagagtaaaaacaaactcagtttctcccactagtcttgcaacatgcttcggacaccaggtatgtggggattttctccccacaaatcacgcaggtcgtcagttctgcagtggacacaggctgggtgtcgtctgtcatcctaattcagtcatctattctgacagcgtcttcctggagataccagcagacccccacaggttaacggctcagccccgcaagactgccccccacttccagtgcccaggttgtttgacctgcgcttgggaccgacggggcgtaacccggtgacctcctcaggttgcggtaatttgctagagtggctcccgaactcacagacatgttttacttacacttaccagcagagtataaaggattacaaagaatacaggtgaagagatgcgtgacgtaaaaccggggggaagcgcttggaaattcagggcctctctgggcaccgcctccaggaacccccacgtactatctggaagctccctgaacccagcccttttgggtttttacaggaacttcatttcacaggcgtgattcatcagccactggtgatcaacgcaaccttcacccctctctcctccccagaggttgggggtggggctgaaagtccccagaacctctaaccctgccttggtctttcctgcgaccagccccatccagaagctccctaggggctgccggccaccagtccactcagcctacaaaagacatcactttggaggttcccgggatttcaagagttgtatgccaggaaaaggggatggagctgaaatacacagttcactgtatcagttacctcaaacttaaaacgaccaaaacccacctctgatctccacatcacccagacccgacagtctaccgcaaagcaataaatggccaccttctccctcttcctctggccccaaacccctgagttacatttgccttttccgtctctgccttatgttccatgaccagtaaccgcaatggcttcacgttccaaacacatccgggacccaggggtttcctccccgcgccgccctcctttgggccatccctccccaggtctcgagagaccgcagcaagagtctccgctaacgcctcgccgggcccccgccgccttccccggaggctgctccagggcccgggaaagctctcacccccgaacccggcgtggcccctccgcccccggcccgggaagccaagtccccgcaactgccctttccgcggccggaatggcctttcccgaccggccctggtttccccggccgcctcgcccaactgctgccggctccaggggcgcggccgggaccccaggcccgaggagggcgtcggggcggggaaggggccagggtgcggggacccagcgaccgcctgggccttacctgaggcgggggcggcggccgcgcttggcggaggaactggggtcccgctgcggcccagacctcccggccgcgggcccagccgccgcaccagccaccgcacagcgatcagcagcaccgaggcgcccagcagctcccaggccagcgccgcccactcggccgccgccagccgcggccacagcatcgccgccgcccgggccgcagccgccgagaagcccgcgccccgcgccgcgcccgtcccaggaccccgcgccgggctgcccgcgccctgcctgacggcgccgcgctcgaggcggccggggcggcgcgggggacacggacggcggccccgctcgcggaggcccggcgagggcgcggccccggccctgggacccaagcgggcgggaacgggcgagcggacgggcgggcgcggcaggcggggcgcgggcagcccgacgcggggtcctgggaccggcgaggcgcggggagcgcaatgtgctggcgggggccggggctggggcccggggaggccaccagggcggggccgggcgcggggcggcgcttcttcgcgcctcccggccccggcctggcgtccgtggggcgctgtgcgtctccgagaacgaagcggcctccgggttcgtgtgctccgagcccgagtactgtttgcggccgtcgtcccgtcctggagcaggagtgaggaagcgcctctcactcccccgcgaacccgcagaacaggccgccggcgctatggagaccggcggagcttcccgctccttcaccaaggggccctgacgcgcagttgaaagcgcggattttgccgggcgcggcggctgcgtccggagtcccagcgccttgggaggcgaggcgggaggatccccacggcccgggagctcgagaccagcccgggcaaatattttgaaagtcatggtaaaagccgcaattacttttgcaccaacctaatagtgagaccctgtctcgaaaaagggaaggaggattttactgtatgtaatttagatgttttatttattttttgatgcggtgtcttgctctgtcgcccaggctgaagtgcagtggcgcgatctcggctcactgcagcctccgcctcctgggctcaagcgattctcctgcctcagcctcccaagtagctgggattacaggtgcccaccaccacgcctggctaatttttgcatgtttagtagagacggggtttcctcatgttggccagactggtctcgaattcttgatgtcaagtgatccaccagcctcggcctcccaaagtgctgggattacaggcgtgagccaccgcgccccgcctaatttagatattattaaatgaaaatgaaagacctgaaaaatataattgatatccttggttaaaaacataattgatctgagcgaggtggctcaggtctgtagtctcagcaactctggagcgtgaggggtgatggtagtttcagtccgggagttcgaggctgccatgagcgtgatctcgcctgtgaatagccactgcacgccagcctgaccaacatagcaagaccccatctcttaaaaaatatcattggatggtactaatggttggttgggcactacagaagaaagggtcagtaattttgaagatggatgaaatggaaattcaaaccacgatgagatgctgcttgaaatccaccagaatggctaaaatttaaaaattggcaatatcaaattttgctggcaagagcaaacactgagttaaccaccttggaaaatagtgaggcagtttctttcaaagttaaacgtacacctctgctgtattctgagtgtctgtccccagcgttcgtatgttgaaaccctaaccccccttggccgggcgtggtggctcacgcctgtaatcccagcactttgggaggccgaggcgggcagatcacgaggtcaggagatcgagaccatcctggctaacacggtgaaacccagtctctactaaaaaatacaaaaaattagccgggcatgctggaaggcacctgtagtcccagctactcgggaggctgaggcaagagaatggtgtgaacccgggaggcggagcttgcagtgagccaagatcgcgccactgcactccagcctgggtgacagagcgagactctgtctcaaaaaaaaaaagaaaccctaacccccaaggtgatggtattaggatgtggggcttgtgggaggtgataggtcatgggacagagccttatatacttcccttagaagaggcccaagaaggctgggcacggtggctcacacctgtaatcccagcactttgggaggtcgagacaggaggatcgcttgagcccaggaggtggagaccagcctgagcaatatggcgagacgctgtctgtgctaaaaatttaaaaaattagctgaacgtggtggcacacgccttgaggagggaggattacttgagcctgggaggtcaaggctgcagtgagcgaagattgcgccattgccctccagcctgggagagagagaccctgtctcaaaaataaataaataaacaagtacgtacatacatacataaaaaggtaattatgtaagtcctcgttacggagcctccatacatgaagggctttagagccgatttgttaaatggtcagctgtagtcagctgttgacacccagcgtccactctccattaagttattaagagctttttcttagttacagaagctctcagtgggctgtggagacgctgccgtctcctgaacacatccagcgaccacatgactaagcaaaggcagcggagagtggacggacggtgatggacgcggccacggagcccaagcgcccacaatgcgcattcctgtcttttctctccccgctcacctcagagcgggacggaaggtgggactgggagagctgttctcgggcaggtggacgctgtggattagcggagagggaaggcactttcgttctcggcaccgtgaggctgtcctggtcaatcctgttttcatgcttgagggtctctggtgcagcagctccaccagccttgacaccaggacttctgtggaatccaggtaagcagccagggtcctgatagggccatgccctcacccccatgtaatgcatccactcccagttaaatgagaaaggaacaatcacaggaaaacatggagaacaactccactgttcagaagccaaccctatattagctactgtttaggtagaaatgaaaaactttgagacgtaaactcctgcaggtagaagtagatttccggtgaatgaacaaaatgaagcttattagaatcaatggcctcttctgagagccgttctgaatttttttttttttgagacggagtcttgctatgtcgcccaggctggagtgcagtggcgcgatctcggctcactgcaagctccgccttccgggttcacgccattctcctgcctcagcctccccagtagctgggactacaggcgcccgccaccacgcccggctaattttttgtatttttagtagagacggggtttcaccgcgttagccaggatggtcttgatctcctgacctcatgatccgcccacctcggcctcccaaagtgctgggattacagtcgtgagccactgcgcccagccctgattttattcctagttgtaatttaacttctacttcatttctgatccgagatcacaaaggggccatgtgagccccagggactgagcggaagctgaagtctcacagctcgaggatttactcccaacgtgctgggaaaagccctagatgagcagggagtagctaatttcttttcttccccttctttttcaatattaattggatttccttaaaggccgtgtgtctattaagtttgttatcaatggctatttagcacttgtagaaacccagccgtatgttacatacagtagggtctagtcaggaaaacagcccaggccaagtggttcagcagaggaaatgcaggggcagggacggcaaccgcaggacgccagaggccctcaggtggagataacggccctgagtggaaacgtacaggctccagaacctggtgggacctgggctgatgcaggggaatgaggggtttcaggggagctacggccgtgaccatcagacgcccagctgcagggacaggcaggtggcggggggggggggtctgttttctgggtgaagatgggggcatttttgaaagcattgggaagatacacttgacgtatctatccagtctccagaaatgcacgtttaacgctcagaaggaaatcttgcaacaattgaagtgctgtgggaggctccgcgagcagagacaagattgtccttctctgggtttcagggcatttagacatgacactcaaaaatatttcactgtgggccgggcgcggtggctcatgcctgtaatcctagcactttgggaggcagaggcaggtgaatcacctgaggtcaggggttcaagaccagcctgaacaaaatggtgaaaccccatctctactgaaaatacaaaaattagccgggcgtggtggcgggagcctgtaagcccagctactctggaggctgaggcaggagagtcacttgaacctggcaggcagaggttgcagtgagctgagatcgagacactgcactccagcctgggcaacaagagtgaaactccgtctcaaaatatatctatttcatgtgaaggtgaaatccaaccccgacgatgtgtagaaaagcccagcaatctcccgcaaatccctgagccgatggccgcggagatgggtgtcctggtggtgctcccagagctgcctccccaggtgccaccaggacatgctgcctttggggctagaggttcccacctcatcagtaacgagggcatcgccagccctcagctgccttgggcgcccacagtcggctttcacgcctcccagaggttccgccaccttcagccctcacttcagatggagtcagaacttagagatgtggacactgtgaaggtcaccggcagccagtggtggagccgggggaagggtgtaggacgcccccacacacaggtgaagagggcactgccagggggagggctgtaggacacccccacacagaggtgaagagggcactgccaggaggagggctgtaggacgcccccacacacaggcgagcagagggcgttgcaaacatgggcagaggcggcccagcagcagtttaacattgccctgtgtccaggagaaaggccactgcccaagtatgctctttatcgcaacctgcaacattccccctcagacggaagcttgtgtagaggccgccaagttccaacaaatgctcccgactgtagacgccaccaagtgctgggacttgctctcgtcatctgggaaaggcttggggacgctgccagcaactgtcatgtttatccatcaagctagacggcggaagtgcagtcgtcttagtttcccccattatctgcttcctgctttttttttttatctcgagtctcaactttgttgcccaggctggagtgcaacggcacgaactccactcactgcagcctccacctcccggcttcaacaattctcctgcctcagcttcctgagtagctgggattacaggcgcccatcaccacgcccggctaatttttgtatttttagtagagatggggtttcaccatgttagccaggcgggtttcaaattcctgatcttgagtgattcacccgcctcagcctcccaaagcgctgggattacaggcatgagccactgtgcctggcctgcttcctaatactacccgaggtctcagatttctgagtgacctggtaatttttaaatcctgagtctccttcatgcctgtaatcccagcactttgggaggccgaggcgggcggatcatgaggtcaggagatcgagaccatccgggccgacacggtgaaaccccgtctctactaaaatacaaaaagaaattagccgggcgtggtggcgggagcctgtagtcccagctactcaggaggctgaggcaggagaatggcgtgaacctgggaggcgtagcttgcagtgagccgagatcgcgccgccgcacaccagcctgggccacagagtgagactccgtctccaaaaaaaaaaaaaaaaaaaaatcctgagcctcccatcagcgatacgtcctctgtcctacactcaacccaaattcctgacagtacctgccgccactctaagccaggaagaagtgacccattcatctctgccaaaaccactcctgacacccactgctgagctctgtagcaggacgcagcgtggagcttcgagctgctgagacagacacagcttaaaatatacctgtcagtgcagtgcctgcaaacacgtagcaactccatggagaaaaggaaaaagttcagatacatacatgtccccttaagggttctatagaccaaaaaaaattatatccttaatatttcagaaagttaaggccacagaaggtggtcagggaatttttactctgtgtagcaattctctgggtacagaagctggtaacgctcacaggaagaagtgcattaatcccacagggccaagcccagcgaccaccacttcctgccccttttctgtactttttaaaccatggtggcctctaataacgtctaactgaaaactctgtacctggttaactctttttttttttagacggagtcatgctctgtcacccaggctggagtgcagtggtgtgatctcggctcactgcaacctctgcccgatcaagcgattcttctgcctcagcctcctgacaagtggggattacaggcgcccgccaccacgccctggctaattttttgtttagtagaggtggagtttcaccatgttggccgggctggtcttgaacccctgacctcaggtgaccaccccctcccagcctcccaaagtgctgggattacaggcgtgagccaccacacccagcttacgcctggttaactcttaatgaccaaaatcaaagtatggatgaaaaagacgagaatctgggaagtcacattgctgaggtctgagagtcatgactccactgtcaccggggaggcccagcagagggcagcacctggatgatgagacccagttcaggaggcgcagcacagagcggtcaccatccttccccggttcaccgggaagcttgctccccctccttctgtattcctggcaaatgacaacgggcaaagcgaagcgtgggccaaggacggaggaggcggtgccgcgcgtctgccgtggtcacaagccacagaagtttgcttcactcctgccagaaaccggcaggacagtagaattctcttttaaagcacgtgttgaacagagtgtgtaataacatgagattaaaaagttactgccaaacgacaaaatataactattaaaatgaagcttccaatgaatatgaaaatctttaccaaaaaatagtttattgcacaaaatttaaggaattcccaagcacacttacatttgtaaaaaatcaacgtgctttttaaagttacactttgtcagacacggtgacccctttcccaagaacagccacaacttgaggactctcttttgtgaggaaatttttaataaaaacaagtaactcaaaagcactgaattttccagaccctctaacacatttccctccggatcctgtgagagcctgagatcacttatgacgagattcacctggaccttccggtcagtgagctcagaacacctcacaccacagcgtcactcaactcaagtccctcctcacatcagagggctcctcgaagggaggccccaggacggttctctcagatttgctggtccctcccctcctagaatcttcacgtacaacattctgtttttgtttttaaagacctcagggaactagaactcggttgtgggaaccctgcaccaaggagagttgagggccagctccttagcgcagcacagcacggactgtgttctggtgggcagggcccctgctggacccacccgaggagagtccatttcacatcctatcagaaacactgcctgatccatattgcagagagtgggaacgggtgtgagtccgtaagacccgtagcatcaatctcacatataccacggaaaaacacatgaaaaccaagttacgttgtttttggaacatcagaaaaacaagtagtgacatcgtgaagtgccctagcctgttgtgacacacggtgtggggatgaacacgccgccctagcccgtgacacacggcgtggggatgaacacgccacataatgcactggtgaccctgttttgtaagcagtactcccaacttcactgccttttccgtgaggatattccatcattcccacttctgcccacaagaacaaaataattcaaactttatgcactgaagtaactctggaaggtagaagtgccgggagagtcccttggagataaaaaaacctcaacaataaaaaaaagcaatttaaaaatccaactgcagccgggggcggtggttcacgcctataattccagcactttgggaggctgaggctcaggatcacctgaggtcaagagttcaagaccagcctggccaacatggtggaactccacccctctaaaaatacaaaaattaggctggtgtggtggcgggcacctgtaatcccagctactggggagaatgaggcaggagaatcgcttgaacccagatggcggagcttgcagtgagcagagatcacgccactgcactccagcctgggcgacagagcgagactctgtctcaaaaaaaaaaaaaaaaaattccaacttcctcttttaggcgtcttcttaaggaaggaagtgtccgcgtgaacacgagaggcctcagatccagaagcacaagccgtgcatgaaaacaccaaaagactcactgcagggagcaaaggcagccaggccctgccaaaccagagggggccctggcaccggcgaccacagagcgctgggggaggcatcgcacccaagggcacacacgcaggaaaaccggggtgagaacatagagctacttttccttcggtattttcagaattagtctgtcctaagagaaaaaaaaatacatggtgaacatcactcacttgaggacttcccataagcaaggagaagtcgctccccactgaatgtgtgatttctcgattttagattttttaaaatcatttatttatttttgagacggagtctcgctctgttgcccaggctggagggcagtggcgcgatctcggctcactgcaagctccgcctcctgggttcaagtgattctcctgcctcagcctcccaagtagctgggattataggtgcgcactacgacacccggctaatttttgtatgtttagtaaagacggggttttgccatgttggccaggatggtctggacctcttgacctcaggtgatccacccgcctcggcctcccaaagtgctgggattacaggcatgagccaccgcgcccggcccgatttcttgattttaaaattaaaacaaaggggtagtacagccaaaataaataagaacgtaaattgccgtatttttttttctaatggtacaagaacaatttagtaaataacatcttcaacttaagataaaaagtaggatatatttataatgaaattttcaagtattatttcaaaattaaccctgtacaaatgatatattttggaaattccaatatttgctagagaatattttttaaataccaaacatctttgtggttaatgctaccttaaccttaccaattaaccttctaaaagtatattacaacagaacacaaatagcttaaaacacaccatactgttttctccacaaaacagacaccagacaccgacatgagcacatctggcctggccagtgactcagaacctcatttcagaccagtacatctgcagaggaggccacgcggacccattctctctctcctaactcatataataaatattattttagattttcttagcaaactaggggacaacttacagaccccacctctcccagtcagccagtgtctgcagggtttcaggatttggggtaggaaacagaagatctcacacatgtcgtgctgattttaaataaggcatctgtctctgagacacctgggagagcacagccaccttcctcacggtgcctgcctgtctcttccggaagtcgcctctgcttgccacatgatgctggtgtaaccacaaaagatccaggacttctcgatgactgcagaagtacaggtgctcctacacacgagtacaggcgctcccacagacaatggtaaagattttcacttggggaacaggagtgtgaggtttgttaccgcctgcgacctacacctggctgactccaggggaaaccgcgggagtcgctgcagggagcccctggtctgctctcctcctcctcctccaccggcctctccctgtgcccccccaaaggtcagatcagatatggggcctcagtgtccttgtgcctcctgatggccgtcaggcctgaccaagggtccaagctgccccttcccagtggccagccacggtggaatcacacagggccagtggcctgagaggaagagaccagcaggaaggaaagatcctcagcaacaaagtaaaaccagaacaacagaggacctttctgtgtaagaatatttggctttagaaggtaaataaaataattatatttcttagaattttctgactatccctaaatcctgcaggtaaattattcccaacaaattttcaaaaggcaatcaataataagtaggttcttcttcaataacatgagcatatgcttcttaaagactgggtgacaggccgggcgcaggggctcacgcctgtaatcccagcactttgggaggctgagatgggcagatcacttgaggtcaggagatcgagaccatcctggccaacatggtgaaaccccattgctactaaaaatacaaacattagcctggcatagtggcgcacgcctgtaatcccagctactcgagaggctgaggcaggagaatcgcatgaacctgggaggcggagcttgcagtgagcggagagtgtgccactgcactccagcctgggcaacaaagcgagactctgtctcaaaaaaaaaaaaaaaaaaaaaacaaagattggattatgatattcagtatctatgtacacatcctatggtgggatggctatccaaaaaaacaagtaaaaagccaaaggtacagataaaatttcatttctgcggaaaagtaaagctcttactgaatggaacagggaagtgagaaactgcagccggcctggccaggcgcggtgccgcagaccctgtcacacagctgctcccagttacgcagcctctccctgtcacccgcagagagcagcatcggtggccgctcagaagccacgacctacaagtaacccttcagacacgttcaaagctcctcgccgagagcctatcaggcttttaagagttggtcattccatgtgaaaagctaattgtgatcttcgaatgtttttctagtccttggctctcattctgctatatattttacttcttgttaaaggcaaaacaaaacttaaatttcatgtcttagaaaaacatcgaccacacaatcaaataaataacattgataagagccttctggggcagcggcgcacggaggcgagtccacagcagtcactctcccggcccttctttggaagccctgctctgactgtgtctctgtgggtcgccgcgtgggccggcgtgaccccccgggggcacagggctggcagtggctggctccagcggcgtccacgaggacagagactcgtgcaccgtcagggcgtgctcctccatctggcgctgcaggctgtccatctcctgcctgggacagaagaaggaggaagaaggcccagatcacacaagtgccaggcagaacgcgccacctgtggacagcgtcactcgctagcacctgagtggaccggggcgccttcggggatccgcaaaccaactgagaccacagaagctcagctgttctcagcaccgttctctacactgtgcagaggacacaggctcaaggaccagtcctgaccaggcggcagggtggaagctgtcactgaggcctggcacacacgacttccactccgttacctgccctcggggcgccgcctggctccgccctacacacttcgctcagcctcaggctgccaggtgcaccatgtgtggccttccagcttctcagggcctatcagggtagtttaactccaggcagtttccacctatgagttcacaggctgtgtgtgcgagttcccccacctttatataaacctcagaggctgtgcgagtccccctcccactttatataaaccgcagaggctgtgtgagtccccctccccctttatataaacctcagaggctgtgcgagtccccctccccctttatataaaccgcagaggctgtgagtccctccccctttatataaaccacagaggctgtgcgagtccccctccccctttatataaacctcagaggctgagtccttccccctttatataaacctcaaaggctgtgtgtgcaagtccctcccttatataaacctcagaggctatgtatgcgagtcccccacccttatataaacctgctgaaactctgctgggcactcagtactggcaccaggagtgccctcccaggtaagagggcattaatctttaagactagctgaagtgcagcacggaatacggtcgtacttgagctgctggaggcagctgttcaggttcttgaggggctccttgctcacggcgggcggtggtctcagcagctcctccagcagcgaggcgggaactgggcagtccgggatcttgatgggcgtggcagggttggaagagctggcctcgcctttcggctcctttctctgtttttaaaagcacatgatcagctttcccaccgtcccctccctcgggtcagtctcactagcacagcttgtggcaaacgggcctccccaactggtggacgtggggcctctgggaaggggaccgtcctggccgccgtggcagcccagcacgacagtccccggagctccagaatagctggctgaggaaacacctttattcctaaggcacaaaaccagagcaaagcagagacaacctaagtcctgggtctgcggcaggacggggccgagccacagactacagctctcccagacgcttctcccatcagatactcaagaccttgatgtggaatttccgtaagaaattaagtaagttttccagcttaggctcccttttctgggacttcaaactttttccacagataagcacacgacgctaaacggcctctcaatccgagcgctgccctcccacctgcctcctggaaaacatggatgtggaccgagcacagaaaaccgccgggcgcctgggcacagctcccgggccccagcccttcacacacagcagggactgccgagtcacagaccaccgctcatctgctttacaaagcacattacaacaaagtggtatttgaattcacagaacgaggaaaacactgttggatgaatgaaaccagaatgaaatgatttcatctgtcaccccattaccactgactacacagcagctgctcagtgtgggctcaacaaatccgtttatgtctgaatgactaacacgtctgccagcctcctgtccgagagcatctacagcgcacgtcggctaccccgggagggacgcgggcctgagtaccgtcttggccgcgccgcggcgtaggtccagcttgagctgctggttctgctggagcagggtcttcatgttgttcttcagctccgacacttttgcctggagcataaatttatccttctgggtcatggacaggtcttcctgggccatctccaactcagacttgacgttctgtggaaaatgaagtcagatttttaaaagctaacagatcttaaacatcctgccaagatccgagtttgtattttcataggttaagcacacacatgtcctcctcggcgccatctagatgatgccagtccaggtccaaaatgctcaggaccagaagtgtgtcaaattttggaattttgaatatttgcgttacaactaccagctgagtatccacaatccaaaaatttgaaatgttccaatgatcatttcctttatcatgttgatgctcagaaagtttcagattttggatttttgttcttgttttttttagacacagggtctcactctgtcatccaggctggagtgcagtggtccaaccacagctcactgcctaagtgctgggactacaggtgtgagccaccaggcctggccaggttttggatttctggatgatggacgcttgtcggcctgtgtctataaataaattctcactgtaactcaagcccctcatttacaaggggaacttagcaattacactcctttcccgagcagtcaagaccgaaccctgagttctttgttgagaagtttatcgcaaattggcaaacttttcccacgcaccctcccatttgctgtagtccatgaaatcacgttcttggtccgtgacacacagcgcggccaagggatcggagccggcccaggcttcgcccctgcctctgtcctgccgcatgacgtggaccaggtggctttgcgagcgccccactggacgagggcgccagctccccgggagcactgcctggccgcaggccgcatggcacaggaaccaggggctgccccagaagtggtgctcccgcctgtgtccagcacctcatacacaggtacctgcagcagctgctgtagcccctccagctccttcctccctgctgctcccgcctgtgtccagcacctcatacacaggtacctgcagcagctgctgtagcccctccagctccttcctgccctgctgctcccgcctgtgcccagcgcctcagatacaggtacctgcagcagctgctgtagcccctccagctccttcctccctgctgctcccgcctgtacccagagcctcacacaggtacccgcagcagctgctgtagcccctccagctccttcctccctgctgctcccgcctgtacccagcgcctcacacacaggtacccgcagcagctgctgtagcccctccagttccttcctccctgctgctcccgcctgtgcccagcgcctcacacacaggtacccgcagcagctgctgtagcccctccagctccttcctccctgctgctcccgcctgtgcccagcgcctcacacacaggtacctgcagcagctgctgtagcccttccagttccttcctgccctgctgctccgtcaagtccagctgctgcttcaaggactggatttctctttctttctgatccacctcccatttgagattttccatctaaagaggggaaagtcacatggccaaaagaatattaaagtggctttactgccctggaaaatggctctagctgtgttttggtttatcttttaataccatattcagaaaaccatcactgttgctccccaagcaggatggagtgaagtcacccagggcacccgtgagtccagccctgcaagtccagcccccgtgaaccgtcacctcttggtttcccacgggctgtttgctgagctgctcgtccagctgcttctgcaggagctggagctgtgcccgggcctcggccagctctgcttggaactgtgctatctcctgggaatgtttcccctcccgaatcctagcgtaaaaaaacaagaaagaagggaatcgccacgctcctccagtgtgctgtgccctcccgctgggaaatgctgcctgtggaaggcgttcgtcctggcaggccctctgctgtgcactgcgtgctgcagccatgcttggtgcccacagtgtgcactcgggcagtcctcacgaagcacctgagactcacacttcactggcacccctcacagatcccagagactcactttgccggcacccctcacagatcccagagagtgccggccccgagaccacagtgcatgggacccacagagccacagcatcagccccgcgccgggccgccccttcccgcctctgacctgaagctaagtactcctgctggggcgctttctctcttggggggaggacacggggcagtgagtgaggctcaggattctggagacggaggctgggtgccttctactcctatgattcactcaagtactcggcaatttgcaaaatatagatgaccctcgctgtgctgaaggtgtgaattagaccccgcccattgccaggacagccatgtttgagggctggcggggcccaggcactcactgaaggtcgtcggcctcggcctgcagcttctgcaccaggtgttccttggcctgcagctccttcttcacctcactcagctccaaggaggccgccttgaagtggcggcggttatgcccggcttccaccttggcagcagccacctaggaggaaggaagccacgttgtccatgccctgcgtgacacccacagctttatgacgtgccgggcgcagggggtgaatgcactcccggccccgtgcatgtcctggctgccggcgtgtgcttctccacaggcctgtcaagttccttgtaaagatgaaaccacctgacccggagctcggcacgcagcaagtgcacacttatgtggctgctgctatctgttgaatgaacacatttattcgagatttctcggtctaaatagtttttatagtcttcttccagtgtattcacagcctggacaacatagcaagaccctgtctccacaaaaaataaaaaaattagcagggcatggtggtcccaggtactcaggaggctgaggtggaaggatcacttgagctcaggagttccaggctgcaggggagctgtgatcgcgccactgcactccagctggggtgacagagtgagacccggtcccaaaaatgaaataaataggccaggcgtggcggctcacgcctgtaatcccagcactgtgggaggccgaggcgggtggatcacgaggtcagatcgagactatcctggctaacacggggaaaccccgtctctactaaaaatacaaaaaattagccaggcgtggtggcgggcacctgtagtcccagctactcaggaggctgaggcaggagaatggcgtgaacccgggaggtggagcttgcagtgagccgagatcgcgccactgcactccggcctgggcgacagagcgagactccatctcaaaatctcaaaaaaataaacaaataaataaataaaaataataaaataaaataaatacatttaaaaaataaaaataaaattaattggaaggccaaggcgggcaggtcatcaggtcaggagattgagaccatcctggctaatatggtgaaaccccatctctactaaaatacaaaaaattagccaggcatggtggtgcacgcctgtagttccagctactggggaggctgaggcaggagaatcacttgaacccgggaggcagaggttacagtgaaccaagattaagccactgcactccagcctggtgacaaagtgagactccgtctgaaaaaaaaaaaaccgaaaaaaattcagtgaaccctaagcacggagcgaaagctggagagctggggcaccgtgtgagccagcctgaaccacggcccagcagcaggccccaggccagggttaaacggccgggcggatgaggcctgtggggccaagagaaagctgttaactgctcctgttaaaatattccagccacattttttttttgagacggagtttcccacttgttgcccaggctggagtgcaatggtgtgatcttggctcaccacaacctccgcctcctggttcaagcgattctcctgcctcagcctcccgagtagctgggactacaggcatgtgccaccacgccaggctaattttgtattcatagtagagacagggtttctccatgttggtcagcctggtcttgaactcccgacctcaggtgatctgcctgcctcagcctcccaaagtgctgggattacaggcatgagccaccgcgcccagccacctgccacatcttaaaattaattctatttataaagaaactttgttgtttcaccccttaaaaaaaatcaagaacctttttcttttcatctcaattacattatcatagaaaagttcttaaaggttgtggcaaagccaggtcataggaacgaaagcagcttcactgttaggccgaaaagtttgaattgtgaagcaattacttttttacaagttcaattcaaacgggatttaaaggaaaagtgatgtgttctttcctgcctttctctagagacaaccagttatttcttgtgttcctcctagaaattttctacatatacatcagcatcaaatgcatgcacacacaccacagcccaggcacacacgtgcgcacacacaccacagcccttgcatggacaccccccccgtgcacatacacacaccccaggcacacacgtgtgtgcacacacaccacagcccttgcacggacacccccccgcgcacatacacacacctcaggcacacacgtgtgtacagacatcacaactcttgcacgcacagccccccgcatgcacacaacccaggcacacacgcgtatacagacatcacaacccttccacgcacagcccgcgtgcacacacaccccaggcacacacgtgcgcacacacaccacagcccttgcacggacacccccccgcgcacatacacacacacaccccaggcacacgtgtgtgcagacatcacacttgcacgcacagccccccgcgtgcacacaccccaggcacacgtgtgtacagacatcacaacacttgcatgcacagccccccgcgtgcacacacaccacaccccaggcacacgtgcacgcacaccccccatgtgcacacacacggcaagcgtactaggagtagctgctctgtgccaggtatggcggaggtagccagcaagcagcagcgttctaacagaggagcagggcccagacagggcacctgggggtcaggatgggcctctgctggcgacgtgaccaacgtgtcagtgaacacctgaagcagggcaggggccagccacgaaaagacagctctctacacagagaagggtccacagaaccacccctcttatctgccgaacacaaatgggatcatatgctattctcaagtttgcttttgcaatgcaacacgacatacaggacaccactcccagcacaatataaatacacatgcacgcggagctcattggccccaggccctcacagctgcactgccatttaatctaacgccaccttctacggaccagagcaggtgctctgcggcctccgtcaccaacaactgcaacacacctttgctctgtgtaactgctggaaggaggctggtgtgtgaaggaccctgcatagatttctaggcactggagcgtcctctggaacgccctgtgagacggaaggtggcacgcacctgctccttgaggctgttcaccttctccttctccttctctagtgaggcctgcagggcctggacaagatgcttcatctggcgatcctcctcttctttgcgctgcaaaactgcctgcacctagatcagattgcaggaggacagataaggaaggacgtcgaattacaaacacacaaggctgctacagcaggcaacgtgacacacgccacatcacaggcacacgccagggaggtagagggaacttcactgctgaagaatctgtgacaaaaacagaatcctaggttgcgggagcatgatcacagggccgcactcaagaacgtggcacgcctgtgggccccacggctccagaggccagggcaggaggatcgctggagcccaggaggttgaggatgcagtgagctatgatggtaccaccgcagtgccctccaccgcactgccctccactccgggcaagagccagaccctgtctcaaaaaaaaaagaatgggccgggcgcggtggctcacacctgtaatcccagcactttgggaggccgaggcaggcggatgacagtcagaaaatcgagaccatcctggctaacacagtgaaaccttgtctctactaaaaatatgaaaaattagctgggcgcggtggtgcacgcctgtagtcccagctataccagaggctgaggcaggagaatcgcttgaacccgggaggcagggagccgcgatcgtgccactgcactccagcctgagagacagagtgagactccgtattactaacaacaacaacaacaaaaaaatggaacatggtggctgggaactcaaaaactacatacaaatcaggggctgcagccgggtacaaaaagaacagaagtggtgggaactagggcaaaatatggaactaagatgggatagtcaacaccagcagctcgatttggcccccaggatttccctgaaatgcccagcctagtcctcaattcagagaggctgtggagactaagtagctgagtgagaaccaggtcagggttcaagtcccagttctgaattgtgtgaacctcttgttaagtgccccctacaaacaatgtcaccgtctgggactggaactcagccacacccacatggaaggtctacccctcaactaagcaggtctgccccccaactaagcaggtctgccccccgactaagcaggtctgcccctcaactaaacaggtgaactgagcacacgcaggggctccagcctcacctcagagagcccagccctgcaccaacagctggggactcagggctgtgggtcacccagacccctgagcctgttcctcccctcggagagcccagccctgcaccaacagctggggacccagggccgtgggtcacccggactcctgagcctgttctctcggctgcaggccgggtgggctaggagtcagcacaggtgactgaatctggatgagattctcggagtgcgcacagccccaccaactctcacaccgttgctggcgtgagtttgacgagtttgaatacctgaaggttcaactggactaggtctgcctccctcttggccaaagctgtttctaggatgctgttgtgttcccgcagagctgcgttggactgaccgaggcccgtaagcttccctttctcgtgctctaattcaagagccaacttcttgtttgactcctcaaggcgttttatcttcttcctaaagcctctggattcttgaagctgaaacataccaatgtcactgtaaaattacctgcactggtgagtggagttcacataccccagaaacaggtgagttttcaacaagaaacagcgaaaacttaggccaggcgcagaggctcacgcctgtaatcacagcacattgggaggccgaggcagggggatcacctgaggtcaggagtttgagaccagcctggccaacatggtgaaaccccgtccctactgaaaatacaaaaattagccactatcgtggcacatgcctttagtcccagctactcaggaggctgaggcagaaggatcgcttgaacccaggaggtggaggttgcagtgagctgagattgtgcccctgcactccagcctgggcaacacagcgagactctgtctcaaaaaaaaaaaaaaaaagaaaaagaaaagaaaagaaacatcgaaaactaaaacacagcaatgggctggacgcagtgactcacacctgtaatcccagcactttgggaggtcaggggtttgagaccagcctagccaacatgatgaaaccctgtctctaccaaaactacagaaattatccaggtgtggtggcgatcacctgtagttccagctactcaggagaatgaggcgggaaaatcacttgaacctgggaagtggaggctgtggtgagccaagattgtgcactccagcctgaatgacagagtgagactctgtctcaagacaacaaaaacaaagaacaatggacaccacacaaccctgcgatggacaccacaggaccgtgcttgcttcatgatctgaaggctgtcgtggtcatggtcagttgcttccccaggcccctctcattcctccccatggccaagagcccagccttctcctggggccatgggcttctggagaagtctgtccaggcactgagccctggctaggccactcagcagggtgggcatgagcaaaaccacttcagggcaggacacagccagagagtggaacaggcggccctactgtgacggagctccacagggaggggctggggagtggggggcgccgggacactgagctgccaccagcagcgctgaagcgagaactgtctctgaacctgagatatctgacgtttttctttttttgagacggagtctcactctgtcgcccagcctggagtgcagtggcgcgatcttggctcactgcaacctccgctcctgggttcaagcggtttacctgcctcagccacccaagtaactgggactacaggcacccgccaccacacccggctaatttttgtatttttagtagagatggggtttcaccatgtcggccaggctggtctcgagctcctaacctcatgatccgcccacctcagcctcccaaagtgctgggattacaggcatgagccactcgcctggcgaagttgggtttcttatttgcaaccaaagcatttgaactgagaagggttccactatgaattctgtaaccattccaccaaagaggctgtacagtgatcctccccagagggctggaatcagggcctgccccaccacagagccagaggccgacggtcagaaggtggcaacaccaaaagtagcaacgctgggcacacggtgaagttttgttcttcgggtctcacgcgtggcggcatgtccagggctcacgtgacctgccccacgctgccgccacagcagatggccaggcctcacctcgtcctccagctccagcaccttctcccgggactcctccagctcctggctggtcagcgctatgacctcctgcagttccttttccagcagcgtcttgctatgactgacagcctgcagctccgcctccagggcctggatcctttcctaagggccaagatggaacgggcgcttggtcatgggacaggccctgacccccctcacttcctgtggtgccggcaggcatgaggctgtgtggctgcacacaccagacaccagctgtctgacacagtctcacaaccttcctttttgttaaagaagttgaattaaccgaccacagcatgcacacgatgacacacggggatagttgggacaaacaaaatcatctcttcagttcaatgcttcaaaaatacagaagaaaatctgacctgcagataatggctataaatcaccatctgtggcaagcaagcagcaccagttgtaataaataccacacacatgctcacgcaccacacatcacatacacacactcatgtaacacacaccacgtgcacatgttcacatcccacacaccacacacacacgtgctcacaccccacacgcacatgctcacaccccacgtgttcacaccccacaccacacatgcacatgtgctcacacctcacactgcatgcacacatacaccccacactgcatgcacacatatgctcacatcccacacaccatgcacacaaacactccacacgctgcacacacacatgctcacacctcacacatgcacggatacatgcaggcacaggtgtgctctcacaccccgcccacttgctgcctcgatggtaccaggcccttgccaagcatgttccagtaccacctaacttaacccttacatgagaaggttctcattcacctcaatttggcctcattttgctgaggatcaaaaaggtgagaaatttgccaaaagtcaccacttgcgaggggtgaagcccggacggacacaagacatcggctcgcagctgtgctattcctcagctgcaacagcgtggcgaggggccagctctgcccggcctttgcgacctccccaccccagcccttagtgagcccaaagaaaatggcaactgaatcaatctccccaacattttacaaagcaaccaggtgagaggaagcacttgatttatttattgaatttcagacacagagtctctatcgcccgggctggagtgcagcagcaaaatcatgactcactgcagtttcagcctcacctcccaggctgaggcgatcctcccacctcagtgtctcaagcatctgtgtccacaggcacgtgctaccatgcctgggttttatttttgtattatttgtaaatacagggtctaattatgttgcccaggctggtctcaaactcctgtgctcaagcgatcctcctgcctcagcctcccaaagcgctgggattataggtgtgagccaccgtgcccggccgagtttatttgacaagaaaaccccacgttatgatacagtctcttcctacccataaattcttaagtggacaggagatagaaacaaaccacatataagaagaaatactaagttgtcagtgcaaggacgtgaattggagaataataaataaaatgcggatgaactcactcaggtagaatgttatgcctaccacgaaaggtgacagagcacggagggccacggcctccacggaaggctctgctcagagccctccagaaagggcacccgcttgttctgggccaccgcagcatggctacctctaaacgctccctgaaccctgtcaatcgctgaccccatgccctcactcctgcttctcagtgagtgcggaggctgcttttcctcctgagatgcgaggaggcgcagaggcagctggaacgcgagcggaccagggcaggccctccctctgccccaagggagcagctgaacttctctgagccaaggagatttcttgaggaaaatcaggtgaacgccacaggccacaggccatgtggggttcatgagggagacgcgaggcaatgctcagtcactgtgggttcctggtaacctggaagatgagcgggagtttagagagttgccacctcccacgcgagctcggccccgctaggctttaggggacaactgctgatggagagcccttccctgcactgaggggctggtgaccctggccggggatggcacggtgttacctacatgtagagccaggctgctgtcactgctgccaccctgggctcggagctggcccagctccgcgtccgcagcctccttggccgcgagggcctcctgcaggcggcggctgaggatgcccacggcgttctcgtaggccttatgtttggtcttcatctccttctgggcgctggtcaagtctgagcccagccgcctcatcttctgcttctgttccgtgatggccctggggtgtcatgagggagacacaggaggaagctgaattatcccgatgtgaccgtctggcattctggttcgcctcccccccggcccccgcacctcccacctggcccccgcacctcccccgggcacatgcagacttacttccgggcctcttgctgcaactcttcgatttgtttcttcagcgcctcattggcctctgtgaccgcgaccatctgctccttatcgaactgcaacgactgtggaagggaaggagggcgtgaggagcggcactgccacccccagcctgtctccccttcctggctccagcccatcacccccaccaaaggcactgctcaggctcgccctggaggacttgggccttgagaaaaatcctgagagagacgtctgccttcttacaaaccactcttttttttttttattgagatggagtctcactctgtcacccaggctggagtgcaggggcgtgatctcagctcactgcaacctccgcctcccaggttcaagtgattctcctgcctcagcctcccgagtggctgggactacaggtgcccgccaccatgcccagctaatttttgtatttttagtagagacagggtttcaccatattggtcaggctagtcttgaactcctgacctcgtgatccacctgcctcggcctcccaaagtgctgggattacaggtgtgagccactgcacccggccacaaaccactcattactgagaccaacaagcgtttccaaacactgtccagagcatcagaggcacaacaggacatgactggttcataggaaagcctgtggacccaggacctctcctccaaaccctcaggacccaggacccctccccagggccccaggaaccctccccaaggcctaggacccctcctcaaggatccagacccctcctaggaaaccccaggacccctccccaagagcccccgggaaccctccccacaagcccctggatcccctccccacagtccccagacccctcccccagagcccccaggacccttcctgagaccccgggacccctccccagaacccctgggacccttccccggagaccccgggacccctccccggagaccacgggacccctccccggagaccccgggacccctccccggagaccccgggacccctccccggagaccccgggacccctccccggagaccccgggacccctccccggagaccccgggacccctccccggagaccacgggacccctccccggagaccacgggacccctccccggagaccccgggacccctccccggagaccccgggacccctccccggagaccccgggaccccttcccgagaccccaggacccttcctgagaccccaggacccttccctggaccccccccggatgccctcctcaggatcaactgtgaacactgagggccgcgtccccgacctgctcctgccctcgcagcctttccccagctcctgtgtgcgaggcgagtccccacaaccagcccaggcctgcagctgtggggtccgaacgtgctctgcccgcactgctgagtcctccaagcctcctacagtccaaagagccggccctccccttggcccacctccccaccccggcaccagcgctaatccatcagccctcactttccaacaatgatggtgccggccacaccgcctactcacaggcctcagcctggctcctaatgagccagacatgctgaccaatctgcctgctgggaccttggctcggtcctctccggcaacttcagaaacttcataagcaaaacgtagcacttggtctaacgtgccatcagacgactctccccaaatttactgttgctctcctgatttctcgtctcacctcccggttcctcagcctggatgtctggacaggatcctggactgcggcctccgtcccccgcctctacccctcacctgctctgctacctgcagccgagaaactgtcaccagcatctcggacacccactgtgtgcagaagccagcccaggctcagcttccacaggaacatgactagctctggtcagtcccagctccgcactcagccacgagggactcccagggtccccgggccccgacgccctgccctgacgtggggtctccacaaaacactcacccttgctttctgcatgacagccgctgtcctctcacatgctagatcccgggagcccatggcaatggggagaagctgggtgcctcacggggcctcctcactccctcccttcatgcaccatcaccacctggacttatcaggcctcaccggactgcccctctgggacctatgctccaggtgggccttgttcccagctgttcttccaaaagcctctcccaccttggccccaccccagacacaggccccgacccagacagaccccgccccagacacaggccccgccccagacacaggccccaccctcccgacaagcactttggccgaatcctccccatcaaatgagtcaacccgacacggacagacctgcaagtgtgtttccatctcgtctcgctccttctgcgccgactggagatgcccttcaaggtccgccatgtgctgacggacctgggccacctctctgtgcaggcgcgagagctccgcctcggcagtccgcttctccccgtgcacttgcatcagctcctgccgcagctccttcagctccgagtccagcctcttcctggtggctttcagctcactgatgagctggtctttggaggtggcgtcgcgccggtaggcctccaccatcacctgccaaagacagaggctgtgagcggacgctgggcggcggggcgtggggggcgtacctgggggtcaagctggcttcaacaaaaatgtttaccacttatcgggggcataacttttttgaggtaaagatacatttcatcaaatctaagactccatcgactgagacacaccactgtttatccacaggtgacatcactgcctgttgagagactgcgtggtgcacaaggcagtcacaccggcctcatagacgtctcctctattccaaggagtctggctctctcctgacttcagttgcacggctttgcttccaacaggtaatccccttgcttgtggctcagtaataaagcaaagcaggactcacgacaccgcttcaggggccgcccttgctcagaaataaaatacagcaggccgggcgcggtggctcacacttgtaatcccagcactctcagaaataaaatacagcaggccgggcgcggtggctcacacttgtaatcccagcactctgggagcccgagctggctgatcacctgaggtcaggagttcaaccagcctggccaacaaggtgaaaaccccatctctactaaaaatacaaaaaactagccaggcgtggtggtgcatgcttgtagtcccagctactcacgaggctgaggcatgagaatcatttgaacctggcagttggaggttgcagtgagcggagacagcactactgcactccagcccgggcgacacagccagactctgtctcaaaaaaactaaattacaggccgggcgtggtggctcatgcctgtaatcccagcactttgggaggccaaggtgggcggatcacgaggtcaggagattgagaccatcctggctaacacggtgaaaccccgtctctactaaaaatgcaaaaaaaaattagtcgggcgtggtggccggtgcctgtagtcccagctactcaggaggctgaggcaagagaatggcgtgaacctgggaggcggagcttgcagtgagccgagatcgcaccactgccctccagcctggggtacagagcgagacttcatctcaaaaataaaataaaataaaatacagcagcgctcacaacgctgcttcaggggtcaccctcgctcagaaataaaacacagcagcactcacaatatagcttcggggtcacccttgctcagatcccataaaatccaacaggaggtactggcttcactgacacaaaatttatattccgtgtctttttggataaccaaaatttgtttcaatgctggaactctatgtgcatttttcaaagacattttaaatggcaaacccaacctgtgtgttaacaacactgcacaacacacagctccctggagtgagcacaacagggtatgctgacaggcgctccagtgacagccgcccctggagatctgaggggccaagacccccaccccactgtggaagtgtgtcttgactttgcagattaagtacctttaaaaaaagttaaagagggccgggcgcggtgactcatacctgtaatcccagcactttgggaggccgaggagggtggatcacctgaggtcaggagattgagaccatcctggctaacacggagaaaccccatctcaaaatacaaaaaacaaaaaattagccggacgtggtggagggcgcctgtagtcgcagctactcgggaggctgaggcaggagaatagcttgaacccgggaggcagagcttgcagtgagccaagatcgcgtcactgcactccagcctggctgacagagagagactccgtctcaaaaaaaaaaaaaaaaaaaaaaaaaaaaaaaaaaaaatttaaagagaactcaagatgttaccttcttctcaacttcaatgacattggaattgctaagcaattaaaccacagaaaactctgttcatatgcttgtttcaagtgaagaaatcaacaacagatttttaccttttgttggagaaactgttcctttattttttgcatttgctttttcagagcagcagtctcctgctgcaggtgttccacctgtgggagacatgtgcacagacattacactgacggctccaggaggggaatctgtctgcacagatgttacactgaagcctccaggaggggaacacatctgcacaaatgttacagagagctccaggaggggacacatcctcacagatgttacactgagggctccaggaaaggacacatctgcagagatgtttcactgagggctccagaaggggccacatctgcagcgatgttacactgagggctccagaaggggccacatctgcagcgatgttacactgagggctccaggaaaggacacatctgcagagttgttacactgaggactataggaggggaatgtgtctgcacagatgttacactgagggctccaagagggggatgcatgtgcatgaatattacactgagggctacagcagggggacacatctacacagatgttacactgagggctccaggaggggccacatctgcagagatgttacactgagggctccagaaggggccacatctgcagcgatgttacactgagagctccaggaaaggacacatctgcagagttgttacactgagggctccagaaggggacacatctgcagagatgttacactgagggctccaggaaaggacacatctgcagagttgttacactgaggactataggaggggaatgtgtctgcacagatgttacactgagggctccaagagggggatgcatgtgcatgaatattacactgagggctacagcagggggacacatctacacagatgttacactgagggctccaggagggggatgcaactacacagacattacactgatggctccaggagggcacacatctgcacagatgttataggaagaagcacttgtgttctgacgggaactggtggttcctaaggcctgggctctccctcctcaccactgacagcatgaaggcacagtgagtggcagggaggtgggagaggggatgaggccaggggacactgcagcccagggctcggcaagcctttcttggagatgcctgatgggaaaagactgcagctcacaggctgcacgtcagtcacagctgctcagcaatgctcttgcagcacaggcgagcgagcagggctgttacagtgacagtttacagaacccggtgttgggctgcgcccacaggctgagggtgctgaccccaggctctggtccttgtcctgcaaagtctgttggagcccagcccattcagcccaggagcttgtgagaaatgcagagcctcgggccccacacagacccaccgcacaggacctgcactcagagggctccacacagacccaccccacgggacctgcactccgagggctccacacagaccgaccgcacgggacctgcactcggagggctccacacagacccaccacacgggatctgcactcggagggctccacacggaccgaccgcacgggacctgcactcggagggctccacacggactgaccgcacgggacctgcactcggagggctccacacggacccaccccacgggatctccactcggagggctccacacggaccgaccacacgggacctgcactcggagggctccacacagacccaccacacgggatctgcactcggagggccccacacagacccaccccacgggacctgcactcggagggctccacacagacccaccacacgggatctgaactcggagggctccacacagacagaccgcacgggacccgcactcggagggctccacacagacccaccgcacgggacccgcactcggagggctccacacagacccaccccacgggacccgcactcggagggctccacacagacccaccgcacgggacccgcactcggagggctccacacagacccaccgcacgggacccgcactcggagggctccacacagacccaccgcacgggacccgcactcggagggctccacactgacccaccgcacgggacccgcactcggagggctccacacagacccaccgcacgggacccgcactcggagggctccacacagacccaccgcacgggacccgcactcggagggctccacacagacccaccgcacgggacccgcactcggagggctccacacagacccaccgcacgggacccgcactcggagggctccacacagacccaccgcacgggacccgcactcggagggctccacacagacccaccgcacgggacccgcactcggagggctccacacagacccaccgcacgggacccgcactcggagggctccacacagacccaccgcacgggacccgcactcggagggctccacacagacccaccgcacgggacccgcactcggagggctccacacagacccaccgcacgggacccgcactcggagggctccacacagacccaccgcacgggacccgcactcggagggctccacacagacccaccacacgggatctgcactcggagggctccatacagacccacggcacaggacctgcacttggagggtcccggaggactcaggaatccatgtgtttgtgaaacacttctctacctcagcaaacagctctcagtgcacacacacatggggcggccgactccagaaatagggaagagcttgtttagggcctaggttttctgtctgaatacagaacacactgcatgcaaatcctagttatcactagagcatgactgaagaatgagcctttttccctacaatatggagggcggtccctcaggagcccccctgcgaaggatcaaagtgctggttgttccacacgcatcattcatccgttccgatgatcctcacgtcacctgcccctggtcccacagcggctcccacagtgggcaacagacttggaactcagcaaacagggagccatggtcagagaaacctcagcccccacgtggatactgctgtgtctagatgcctagggaatgcagtggctcacgcctgtaatcccagcacttcgggaggctgaggcgggcagttcactcgagcctaagagtttgagaccagcctgggcaacatggcaaaaccccgtatctatttaaaaaaaaaaaaaaaaaaaaagatggccggggatgtgtgcacattccgacaaggccaggcagagtggccaacaccaggcaggcccaggaggccagtccgtctcccagtcggctgactatggtccccaggtggaaaacagacttcagagctgggaaggcagcttccaagacaaggtcactgctaccaccaccttcatctgccctggggaaaacagcccaacccagaggttaacttggattaaataactgccagtaatgacaacacaggtaaaattccaatatgagaaataacatatagctccacaaaagtctctctcgcagtcttccaggtatcagctgtttcttactgagctaatggtcagtaaaatcaagtttaaattcatccacagaattgggacaattcctctaaatttactcccccaacactgtaaacagtaatgacctgtctgagtgcctctttactagaaaatcacttagtacaggtcagtgtttgtagtgacagcttccttcagaaaggagggaaaacaggctcatgatttcctcttgcccttgatccttatagagtgggatttaaagacagaataggtggctcacacctgtaatcccaacacttcgggaggccgaggtgagcagatcatgaggtcaagagatgcagaccatcctggccaacatggtgaaaccccatctctactaaaaatacaaaaattagctgggtgtggtggcatgcacctgtagtcctagctacttgggagactgaggcaggagaatcacttgaaccccggaggcagaggttgcagtgagccgagatcaccgcactacactccagcctggcgacagagtgagactccatctcaaaaaaaaaaaaaaagaaaaaaggggtcgggcgcggtggctcacgcctgtaatccgagcactgtgggaggcggaggcaggcagatcacttgggtttaggagttcgagactagcctggccaacatggcaaaactccatctctactacaaatacaaaagttagctgggcacaatggctcaggcctataatcccagcactgtgggagactgaggtgggcggatcacttgaggttaggagttcgagactagcctggccaacatggcaaaaccccatctctactacaaatacaaaaattagccaggcatggtggttcagcctgtaatcccagcactgtgggagaccgaggcgggtggatcacttgaggttaggagtttgagactagcctggccaacatggcgaaaccccatctctactacaaatacaaaaattagctgggcatggtggcgcacacctgtaatcccagctactcaggaggctgaggcacaagaattgcctgaacctgggaggtggaggttgcagtgagcgcagatcatcccactgcactccagcctgggcaacacagcgagactgtttcaaaaaaaaaagaaagaaagaaagaagcaaataatcagcatcattcctgcaaggagggttctgattcaaaacaaaacacagcagaatgcattacctggccggatttgatagctaattcttctcttaacttctctaaagtttccgacgtttcctcggtaccttcttccaagcgtcttgctcctctgtcaagctcctccttgccactcttggccgcctgcaaagccgcctccaagatgatcttctcgttctgcaggaggcagatcgtgtcctccctggaggcggcctcgccctgcagctcccccagcctggcctgcagctcatcgtagtgtgtctgcagggcatcgagggactgctccctgctctgcagagcctcctgagtcaaggtgagctgtttcatcaggtccaggtgctcctgctgcaaagcctcaagctgctggtctcgctggagtaaagtcaacttcacctggagaaggaatgaagcccacatggctgcgcctgaccctcctccgagagcgtatgcccttttcctgttcgggtttcaagtaattttgatggacactatggagggtctttttttcacgcacaatcctggtatagaagaaccagcagggcaaacacagggtcaggtctgcagcagcagcagcgtctgaccgacagcccaactcccacctgagcggacgtggccccacagcagaggactgctcggtctccttgtgtgcagtcctggctgctcgggatcacctggggcctgggtccagcctgaagggctgcagggacttacctgctccagctgctgctccagggatgccgccgagtccgccatcctctgcagccgctccctctcaccttcaaactcttccagcctcctctgaaggtcctcctccaccatcgtctttgcctcctgaatctgcatgaaggctgcttcctgatccaacatgtcagcctgagcccaggaaacttgtttttaaaaaggcaggaaaccttaatagtgaacagcagccggtggccccgtgctctgcagagaaacccaccgccctggcatgggccccatccacctcctcatcctgtctaccgactgcagactgagggcccaggatgggcagcttggccgccccccaaccaggagaccgaggccaggcccagcccaggccagcaaccccgtgagaaggacttggacccactggtgagcagagcctccccgactttctcgtgtggcgacagctgcctcctttcgggagtgagacccggacatgctctcacaagagcggtgcttggtgctaccgggtaagagaccagaggcccccgcagtgaacacagcctcacatcggggtacacttcttagggaaaacacaaattcctaacttgaaacttgaaattcttttcagttcttctctactaagcccttgaagcactatggctgacgcaacgtgattcttctcatcccagccgggcagcccagctaatgccacagagaggtgggagcagtcgcaggagatgagaaaccacgtgaggctgcagagagctccctgtacaactggcaagatcggcaacgagaccagcccagcaacatccagcacagaacctccctccatacactgccttggggttttacaccatttcttcttctttaatttttccacaaggctatcgagtaggtgacactatccccattttataaagatgaggctcacgcctgtaatcccagcactttgggaggccgaggcaggcggatcacctgaggtcaagagtttgagactggcctggccaacatggcgagaccccgtctctactaaaaatacaaaaaattagcagggtatggtgacgagtgcctgtaatcccagctactcgggaggctgaggcaggagaattgcttgaacttggtaggcagaggttgcagtgagccaagatcgcaccactgcactccaccctgggcgacaagagcaaaattccacctcaaaaaaaaaaaagatgcggctcagagaggtaagaaattgtccagcgccccacagctaaaggagaacagctatcaaggctgctgcatttctgtcctctggagatggctgtgcaggcagcggccatgacctcgacagcgtgtggttgctggagggttaaatggcaatgcagtctgagtgctcagtaagcaaagaaaatcctctcatccctaggcttcgacaggctgtcaggcaaaaacgcactggccccttcctccgtacccactctgtacccagcgccatccctgactggcaatgactgacagccgggggcccaggcccaaggcggggcttgcaggaaaagagccgcaagtgctcactgcactaagcccccacaggtgaggatgaggggtggggggggtcccaaagccttaacgagcagtcactgcaggccatccatgctaagcccccacaggtgagggatgaggggtggggggggggtcccaaagccttaacgagcagtcactgcccgccatccatgagaatatttaagagatacacacagagagacggaacatgtaagaaaacacacatggtatcgatgtctgcgtctgttctcctaagcttccacggccccggccgcagcctcacctcaatgccctgcagctgtgccgcgatgcgccccttctccttcatggacctgtgctgagtttccgtcagctgctgggacagggacacattctcgagtttcaggtgctccaggagacctgcctgggtcatctgtccaaccttaaaaaaaaaacccacaaagtaaaaagttgctcaatttcaagcaagaaatgcagaccagcctgtccctggaggccccagggtgagggtcactggctgccccctcagtgtctcccacgcaagccccactacccactacacgtcttcccatctcaaaatatgcgctgtctgggctctgcgtgcctgagtgggagggcgggcgggccatcagccagcgctcatcatgctgtttgtagctcatcagactgcggtttgtagcaggacctacccaaaagtccccattgacaaggcatctctgagcccctgtgggtgaggaggggcatctctgagcccctgtaggtgaggaggcttatcttaactgaacaaatccagccagacacacaccagggcctgccctcagccagacgcccgacaggtgccattccagggatacagccttttcagccagctagggcccggcccagacctccaggtgctcaggcccacgctggccaagcgtctcgtgaaaaagcccaggaccatggccctgaggaggacggcgtcagccaagggaagtagcactgaaaaggaggtgtgaggacagcctggggcctgaggctagacctgcccgcatcgcctctagctccatgctgcttcctggagtgcacagtgcgagacgtgacagaagccacacgctccaggacctcaggagaaggtgcacggagccagggaagacagcctttgctgggactgtgtttcgagaccatgaaagcagactgactgcctggaattctcctccctcctgaacgttactgggaatgaagggatacatttgggtaccaaaaaaatgtattaaaaactctgattaaggaatgctgaacctgggttccaaaggtatttggaaaaagcagtgagggcccggcagtggctcatcctgtaatcccagcacgctgggaggatcgcttgagtccaggagttcaaaacctgcttaggcaacatagcgagaccctgtccttacagaaaacttttaaacaattagccaggtgtgatggtgttcacctatgtcccagctacttggggggctgaggcaggaggactgtttgagcccaacaggtcaaggctgcagggagctatgatggtaacactgaattccagcagcctgggtgacagggcaagaccctgtctccgaaaaaacagcagatagggctctggagccaccattgctttaaagcttcctctctttttgttgtccaggctacaccaccatacttccttgttgttggttttttttttttgagacaaagtctggctctgttgcccaggctgaagtgtggagtgcagcagcgcaatcttggctcactacaacctctgcctcctggattcaagcacatctcatgcctcagcctcccaagtagctgggactacaggcactcaccaccacacctggctaacttttgcatttttagtagagatgcagtttcgctatgttggccaggctggtcttgaactcctggcctcaagtgatcggcccgcctcggcctcccaaagtgctgggattacaggcatgcgctactgcacctggcccaaactatacttctaaaatacacctggcttggcctacgtctttaaatacctcatataaatgcactgcagctgtaaaaaagtgtattaatttgtatactgatttgtttccaagctatgttgtaagtagaacaaatgcttttccgtattgttctttggcttaaaaaatatgtaacagtcgagtgtggtggctcacacctgtaatcccagcactctggaaggctgaggaaggcggatcacaaggtcaagagttcaagacgagcttggccaatatggtgaaaccccatctctcctaaaaatacaaaaattagccgggcatggtggcgggcgcctgtaatcccagctactcgggacgctgaggcaggagaatcacttgaacccaggagacagaggttgcagtgagctgagatcacaacactgtactccagcctgggagacagagcaagactccatctcaaaacaaacaaaaaagtaacgaaaattgaagaaaagttctattgtgtatatttgtaactctagatgtaaaaggaacatttggtggaattagtatttcacgttcccctcttgagaaataaagttttaataaatttataatattttatctgggaaaaaaaaattccacagctaattaaaaaataacaggccaggtgcggtggctcacgcctgtaatcccaacactttgggaggctgaggcaggcatcacttgagcccaggagttggaggccagcctgggcaacatggcaaaaccttgtctctacaaaaagtacaaaacttagccgggcatggtggcaaatgtctgtgatcccagctagttaagaggctgaggtaggagaatagcttgagtctgagaggttgaggctgcagtgagctgagatcgcaccactgctctccagcctgggtgacggagtgagacacagtctcaaaaaaaaaccaaaaacaaaaagactgaggctgaccaaaggtactcttcagcatctctgaggtcatcctaattagtctaggtgctgagactcggatcgaggttcactcgaaccattcgcctgtcggtctgggcgtctccagcacacgaagcagttgctgtgggccgaggcacaggcctggacggacacacactcccacatatgcgggaccaagctggacatgggctgtgcccgctaacgagtggacgggagaggaaagagttttccaacaggacgtagaaaatgcaaggcctgctgggaagacgtggtccccgtgtatcactgagggctcaggcagcagggaaaggaaaagctccaaccgggaagagaaccccactggcaccgcacgcctgtgagacatcacagcagagtggggaggctgaggtgggagggtcctgagacccaggcagatgaggattcacaggcacgcaacactgtgccgagtcaggaggccagggtgggagggtcccgagacccaggcaaatgaggattcaccggcatgtgtcaccatgcccagcaagagaggctttggaactgaaaatgctggcagaggctgccgtgggactcccatgtcagaaggttgggggggggcccacgggacacgtcctgcatacgacacgtcctacatgggacacggggtgggctggacagcaggttaaaaacaaaaacatgcctgtgaactctaaaaacagaaaaatctcaggaaaaagcaccgttctacatgaagacaagaagcgtgacctgccctggaaggtagatgtgggccgtacctggatgtgggccatctcaccctgcagcctgacgcgggcctcctgtgccagggcgagctgctgctggtaccactgccggacactctgcagggacgagatctccgcctgcgacgccttcagcttgctggtcagcgtcgtccgctccagctgcacctgctgaagctggctctgcaaggctgtcatctgctgtcgcaggtcgtgcactgaaatggggcaagcacagcggctcaggccagcgacggccaacgggggagtccgcagctccgcgcgtgcgggacacaaggcgggactctcaggggagaccaagaatgagtcagttccggttattccccatagctgactccatgaagtcgccgtgaacacggcattagtgggcgctgagagatgccgctcctggcagaaatgcagggtgaggttcctgcaggcctctgctcacagcaccttcaccagctcatcaatacataacctctgttcagtgtttccatttacgacaccgatctaatacatagcgtcgattcattcacaccgagctcacggccaacagcaacttgaccaacaagcctgagcaaagattctctaggaaataacagtggccggacacgggggtgcagggggcatggggggtgcagggggcacaggggtgcacgcccaggagatccagaccagcctgggcaacacagcgagatcccccaccaccaaaaaaaaaaaattagccaggcggggtggcatgcatctgtggtcccagccacttgggaggctgaggcgggcggatcccatgagcccaggagtttgaggctgcagtgagccacaactgcactgctgcactccagcgtgggcaacagagcaacccatctcaaagacaaatgaatttttaaaaacaaaaagaaaatttaaaaaaatagaaacaggatgaattgaaaaaaataaaccaaaagaaaaaaatgaagtacatcttctccatgaaacacctcacatcctctctgtgtttaaaaacactagacagtgttggccgggcacagtggctcacgcctgtaatcccagcactttgggaggctgaggcgggcggatcacctgaggttgggagttcgagaccagcctggccaacatggagaaaccctgtctctaataaaaatacaaaattagccgggcgcggtggcagacgcctgtaataccagctactagggaggctgaggcaggagaatcgcttgaacctgggaggcagaggttgcggtgagccaagatggcgccattgcactccagcctgggcaacaagagtgaaactccgtctcaaaaacaaaacaaaacaacaacaacaacaaaacaacaaaaaaaaacactagacagtgtttggggccatctttaactgcaaaattaccccccaaagcacaaacatgtaaacatggccctggaaagaactcctgcctgcagcccggctgagcaccaaggcaggcagagtatcctgccctcctcagcgggcgcctaggatgactcacgtactctgctgctccacacgtgtccatgaatactgagtttgtggttcaaacaaatttaatcaagtcggcaaattcacacttaggaaatctgtgaaaatggtcatggacgccgaggctctgtcttcgacccaacgatgtctaccagccatcaacaaacagcaagggtatccgtgtggctaattccaacttaaacccaccggttaggactgggcggcctcatcaaagttcaggttggttttgccaccccccgatcactggtcaagtgaagcgtggcaacccacagggccccaaactactttagtgttgagaactttttgggtttcatggtttttcctaagggattgggtatcacgaaatgctcaaggactaaaatattaaagcgattacaagagtactactgtctctcggccggctttctctttcctagtattagaatgtagcctctgtgacgccagcttgtcaccttcctctgtgtcatccaagacccagtctcacagcctcataggcggaccggctcacatggagtcagccctcacagcggctgcaccagggacccctggctcaggagatcccaagacctgagagatgagcccaccaagcggcctccctgggaggactctggacccgggtcactctacacccctcgggctttgtcttcaatcttcccaccctgcttcgccctctccttcccactcctgttcacgcttgctctgagcaggccaaccacagtcttctccgtgtctgctgggcactggagtgtgagctctgggactggcccgggcggggactgagggggtggaaggcgtgctgccaagccacatggaagcccgccgcggcttccgcaatccactgccctacttgtactctctgggcgagccctatagggaggcagctggaccgacgcactgcatccagggagaaaaggttgccagacggacagtcaaggagctgttcttgaatattttaaatggaatctgcaattctgtggaataagtgggcagctctatactcccaaataacactggacttttgaggcaggatcaccgcagatactccagggtccaaggtcaatctccaagacctaattcattcccctggatgtgcacacaaaaatgtacacaattccacaagttcaactaaaacttgtatttcctttagaaaagcagcctccttatgtgtaaactataaaccaatgcaaccctcacaggcacagtcacatgccgacagagctgtcagcaccagggaggagggcgtggcgaggaccagtcagggaaggagggcgtggcggggaccagtcgaggaaggagggagcagcggggaccagtcgaggaaggaggagggagcagcaaggaccagtcagggaaggaggagggcgtggcgggggccagtcgaggaaggaggagggagcagcagggaccagtcagggaggggagggcgtggccagggccagcctcacctgtgttgtccttgctgagcatgctcctctgcatgtcctctaccttggccataagcctctggtactgctcctcggccacctgcaagtcgttgttggacgacgccaggctggcattttttgcctccagcatgttctgcaggtcagtcatggctcgctccaggtcccagcacgactgcttcagggtgtccacctccgagctcagcgaatcctgccgctgctggctgctgtggctgcactccacctgcgcctgcagcttcgtgctgagggcggccagctgggcctgcagctcagccttctctttaagtgcctgaaaagatcccaacaaccacaatgattttaagaaaacgagtcacttccatccagtgtattaacaggaacacaaccagcgagtcagtcagggcctgacaggggaccccgagacccccaggcgctctcccaaggcctgacagaggaccccaagacccccaggcgctctcccaaggcctgacaggggaccccaagacccccaggcgctctcccaaggcctgacaggggaccccaagacccccaggcgctctcccaaggcctgacagaggaccctgccccgagacccccaggcgctctcccaaggcctgacaggggaccccgagacccccaggcgctctcccaaggcctgacaggggaccccgagacccccaggcgctctcccaaggcctgacaggggaccccgagacccccaggcgctctcccaaggcctgacaggggaccccgagacccccaggcgctctcccaaggcctgacaggggaccccgagacccccaggcgctctcccaaggcctgacaggggaccccgagacccccaggcgctctcccaaggcctgacaggggaccccgagacccccaggcgctctcccaaggcctgacagaggaccccgagacccccaggcgctctcccagcacagccgtcacagaaaaaggcgactttccaaacaggcccaggacgcacagggagcctgcactggttttgggcccaactgcacctgcacagggcagcgctagggcagggctggggaagcacccgtctcctgcgaggacactggaaacgtgttcaaaacaccaaacgtgtacacgggtgcacatgtatgcgcacacacacagaatgccagacgtgtagagggacccctgagagattaaaagcggattcagatctggggggaaatgggcaaaaaacacaggcagggaaaggcggctgcctaagtgcggctccagccagagccacgggacacagcacagtcctgagtggccaccgcagtgctgtgtggtcccaggagcagcagagaatcgccagaggaaatcgccccaccacctgcccccacgctgaggcctacaggggcagggatccagttcacacatcaccaagacaacaaacacccaaagcaattgaggaactccacaaactccaggagaccctagagcaaggggccagcaaccaccacacctgaaacaaccctcacgatcttggtgtggatgcaaccgaaggaccaatcagtgatcctaagaggataagaagacaaagtgcagtgacagcaagccaccgttcgagagagtggctacacagaggaggggaaatgcatccgacggagggaggctcacgctgtaacactggagaagtgacgaccgtacaaccagaattagcctcaaaacagccgaaatcacctcttctgtagacacagctttaggtgtcacaaactggttggtttgtgtccaaggaccatgttgtatgagaaaaccatcttcgacatgaggcgtgcatttagcaaggcaagctccggacactgtgagcagctccagccctgctctgcggcctcgcaggccacaggaggctccctcagctgtgtcacctcagggcctgggtgcattctcaccctcccacgccagaagcggacagctgaaccccactgaacagatttactcaactgccgacagaagataaatacctagctcttcactgtggataaagtgcatacgacaaaatgacaaaggagagctgaaataagggatggaaaatgatgtttctggcacatgctaaccaagccagcgtgtgcagctttctctgatacagcacaattagtatcagaaaaagcagaaatcactacaaagaaaaaaggttcaccatgccagaaaaagctgcaacccaccaagagaatttgactcttatggactgtgagacacctaacatctagcaaatattctggtagagacgcagggagaaacacgcccatgcacgatgaggcagaaaactcacaactctttctaaggctgacaagtagacaaaaaacgtaaagatgcagaaccctcggctgccacacatgctgcggcggctgattcccaaccacatctgtgaaacctcgtacccaacagaggagccacacatgctttccgacttcgccgcacgctgagatgtcagtcgaacgtccgttacctgactcgcctccagtgacaaggcttccagctgtccttcgagtcgcattttctctttgagcacctgcagcatctcctcctgtgtttctgctgcagagctctccaaggacacgctggggacaaaggcacgggtcaggcctgtgcgagccatcctcattttctttcacactcctccacattctccaaattccacacacccctgctgctctctcccaattttttaaaattaagtaagagatttaagtagagagctgaggcttgcatgatgcacggatgaacattcctgccaacagttggcacctcacgcagtgggaactgttacagaaacatgagacatgcaagcgtcgtgcagcttagtgacaagtctatgtaaacgggagactggatattttagtaacacagaccattgctgatctaattctactgattaaaaagcagcagacttgttatgaattaaatgttcatgtcaagactaaggatagaatcaggaagaaaagctgtgtatcacctgttccagtgcggagagccgtgggcccgggaagcaacatctcaggccaggccctctgcctgccctgcccgtctctgcccaccccgccccctctgttggccccacccacctctgctaccgccccacccacctctgcccgccccacacccccctctgttggccccacccacctccacccaccccgcccacctctgctgtccccaccacctgctgcagatgctgtctctccgactccgcacctccccgttgacctcctgcccctggtcttggtgctcagcggctgcggcctggaggacgtccttaatggaggggaactggcccagggtatccgcaggaatctcctggccgttgaccatatagggggtgtcctgcgtgcccactgtcttcgacagaatgccataggtccctcgggtggaggcgctgctgtacgatgagctgtcgctgtcatttccatccacctcagacacgctgtctccagccagggaggtgttctccagacggtcgtcagtgtcgggggacaggctgatctcagacacaacggacgccgcactgcttctgttctgcttcagggaacccttggtagaatcgggagccgggacatttcccccagaattccccgcatttgaatcttcagttctgtaatcggccagagaccggattttgcttgatttggaagtttttttctccctaggatgtgccggaagccccaggctgcccaccttaggcccccgagggacactggtgcgcaggaaggaatattcttttgtcatagccagggtactggcccttggtaagttttctgggtttaacatgagctcaggatcaagcgtgctaaaaagtctcgttttggttgcaggttgactggactgagaagaaaacaaaagtacaaaaattacatttaaaatccacaagcagcatacttaaaactgccattcagaaaggtggcaccgatcactactccctccgctgacaaccagagagcaccacctccccagcccctcaccacacagggtgcggccaggcctccgatccgtggtggtctcactgccgcaaggccccactctagtgaccagcatgaccacctctggtctaaagcacactcttcagtgactgtgacctcaacacgtttaaaacacatcccagcaagtacctcctcatcagacttctgtagggaccagccccacagggtcagtgggtctccccctgtgtgcggcgacgagagtgtagaaataaagacacaagacaaagagacaagagaaaaggcagctgggcctgggggaccactaccaccaatgcgcggagaccggtagtggccctgaatgtcgggctgcgctgttatttattggatacaaggcagaaggggcagggtaaagaatgtgagtcacctccaatgataggtaaggtcacgtgggtcacgtgtccactggacgggggcccttccctgcctggcaaccaaggcagagagggagaggagacacaaagacagcttacgccattatttctgcatatcagggactattagtactttcactaatttactactgctgtctagaaggcagagccaggtatacaggatggaacatgaaggcagactaggagtgtgaccactgaagcacagcatcacagggagatggttaggcctccggataactgcgggcaggcctgacatcagtcaggccctccacaagaggtggaggagcagagtcttctctaaactcccccggggaaagggagacaccaacccccacccccgcccccccgccccccggttcccggtctgctaagtagtgggtgttgttccttgacaccttttgctaccgctggaccacgatccgcctggtaacgggcgtcttcccgtcttcccagacactggcttcaccgctagaccaaggagccctctggtggccctgtctgggcataacagaaggcttgcactcttgccttctggtcacacctcactatgtcccctcagctcctatctctgtatggcctggtttttcctaggctatgattatagagcgaggattatcataatattggaataaaaagtaattgctacaaactaatgattaatgatattcatatataatcatatctaagatctatatctggtgtaactattcttgttttatattttattatactggaacagcccgtgtcctctgtctcttgcctcggtgcctgagtggcttgccacccacagacttcctcaacagaactttcctggctactctccagtttattttatttttttggataaacatagaaattttcttcaaggccgggcgtggtggttcacacctgtaatcccagcactttgggaggctgaggcgggcagatcatttgaggtaaggagttcaagaccaggctggccaacatgttgaaacccccgtctctactaaaaatacaaaaaaatgagccaggcatggtggcacacacctgtaatctcagctacttgggaggatgaggcaggagaatcacttgaacccaggaggtggaggtcgtaataagccgagatcatgccactgcactccagcctgggtgacagagtgagaccctgtctccaaaacaaaaaaaaatttcttcaaaaaggaagaacattctgttgaactataaccaccttaaatccataatttcctccgcctgcccacatctgcttgcacgtgtgggcggcaagccacccaggtgccgaggcaagagactgaggacgcgaactgttccagtataataaagtatataaaataagaatagttataccagatatagatcttagatatgattatatatgaatatcattaatcattagtttgcagcaattactttttattccaatattataataatcctcactctacaatcataacctaggaaaaaccaggccatacagagataggagctgaggggacacagtgagaagtgaccagaagacaagtgcgagccttctgttatgcccagacagggccaccagagggctcctgggtctagcggtaacgccagcatctgggaagacgcccattgccaagcagaccatggtctagcggtagcatcagtgtcaaggaaaaacacccactacttagcagagtttagagaagactctactcctccacctcttgtggagggcctgacgtcagtcaggcccgcgcacagttatccggaggcctaaccatcaacctgtgatgctgtgcttcagtggtcacactcctagtctgctttcatgttccatcctgtacacgtggctctgccttttagataacagtagcaaaattagtgaaagtactaaaagtctctgatatgcagaaataacggcataagctgtctctctctctccctctctctctacctcagctgccaggcaggggagggccccctgtccagtgggcacgtgacccacgtgaccttacttatcattggagatgactcacactctttaccctgccccttttgctttgtatccaataaataacagcacagcctgacattcggggccactacctgtctccacgtcttggtggtagtggtccccccggcccagctgtcttttatctctttgtcttgtgtctttatttctacactctctcgtctccgcacacagggagaaaacccactgaccctgtggggctggaccctacatgcacgcccctcaacagagcagctaccccacccccatctagaacccaggccctctgcggccattctaacttatttctcagtttatcctttttgttgttataaatgttatacttcccactaatcttacaactgctaggataactcttcatttttcatacttgcatttttattttttttttgagatggacccaggctggagtgcagtggtgcaatcttggctcactgcaacctctgccgcctgggttcaagcgattctcctgtctcagcctcctgagtagctaggattacaggggtgtgccatcacatccggctaattttttgtatttttagtagagacggggtttctccacgttggccaggctggtctcaaactcctgacctcaagcaatccgcccgccccaccctcccatagtgctgggattataggtgtgagccactgcacccagccagattaaagtatttaaaaacataaccttaaaggtataagaagaacacgctggtcattttattgatcttcttctactgaagagatccttttgaaacatgacataggctgggcgcgatggtgggtgcctgtagtcccagctactcaggaggctgaggcagagaatcactggaacctgggaggtggaggttgcagtgaaccgagatcgctccagcctgggcaacagagtgagactccgtctctcaaaaaaaaaaaaaaaaaaaaacattaaaaaaaaaaagtagccgggcatggtggcacgtgcttttaatcccagttactcgggaggctgaggctggagaattgcttgaactagggagacggaggttgcagtgggccaagactgcaccactacacacctgcttgggtgacaaagcgagattctgtctcaaaatacacacacacacacacacacatatatatatatatatattttttttaactgctcattgacaatacgccagatcacctaagagctctgatgggagatgtacaaggaggtgaatgtcgctttcctgcctgcagacacaacatcccttctgcagcccatggatcaaggactagttttgactttcaagtcttattacttaagaaataccttctgtaagggtacaactgccatagtcatagtgattcctctcatggatctgggcaaagtaaactgaaaaccttctggaaaggattcaccattctagatgccattaaaaacattcatgattcatgggtggaggggtcaaaatatcaacattaacaggagtgtggaagaagctgatttctaccctcacggacagcgttgagggattcagtgcttccgtggagaacttgactgcagatgtggtggaaacagcaagggcactagaactagaagtggagcctgaagatgtgactgaattgctgcaatctcaggataaaacctgaatgggtaaaatgccatcaaatagcaccgcatgttacagagacatcttttctaagatatggtaaactttagtgcggttttaagaaattaccacagcccaaccttcagcaaccaccaccctgatgagtcagcagccatcaaacttgaggcaagatgctccaacagcaaagagattacgacttgctgaaggctcagatgatcgttagcattttttagtaataaagcattttcaaattaatgtgggtacatcagttttatttagacacagtgctactgcacacttagtaaactacagtagcgtatacacataacttctttatgcactaggaaaccaaaaacattgtaggacttgctttattgcaatgtttacatttttgtggtggtccagaactgaacccacagtacctctgaggtcacccgtgtttgctttctttgcttttcaattggcagatttagaaataaaatgtgcttgttgcccctgagcccatggcagctcagagaagccaatggcaggtccccgggttatgtgggaccaacagttgtctctggcacaggaagctttccatgagcttgttcgggagagggagactcaccctctcctgctggcgcttcaccctgtactgtttgagctgctcttccagccacttccgagcctgaagtcggacctgctcctccttctccaggggcaggggagaatctgtagagcctgcagtgggaaaagggcaatttggaaactcataaaataccaggatgcagaacaatcaggcacaagaacttggtcattttgtacttaattacccatatactttacacctaaacaatgcacagccatcttgtttggaaggacaatttctagatcaagagagaactgtgagccccggacacggaccacaggcgggatctacctcacaggagacacagtggccaggcactgggtctgtgatcccatgatgagtacaccccacctggggcattcccctggtaaaacaggaaatggcagcaagtgcctttttttttttttttttttttgagatggagtctcactctgtcgcccagaatggagtgcagtggcatgatctcggctcacagcaacctccgcctcccaggttcacaccattctcctgcctcagcctcccaagtagctgggaatacaggcgcccgccaccacgcctggctaattttttgtatttttagtagagacggggtttcaccatgttagtcaggatggtctcgatctcctgacctcatgatccacccgcctcggcctcccaaagtgctgggattacaggcgtgagccaccgcgcccggccttttttttttttttttttgagacggagtttcattcttgttgcccaggctggagtgcaatggtgcgatctcggctcaccacaacctctgcctcctgggttcaagcgattctcctgccacagcctcctgagtaggtgggattacaggcatgcaacacgacccctgacgactttggtatttttagtagagacagggtttctccatgttggtcaggctggtctcgaactcccgacctgaggtgatccgcccacctcggcctctcaaagtgctgagattatgggcctgagccaccgtgcccggcagcaagtgccttttaacaacagaaagaactgggttcaaagctggagccgtgccgagcactctgaggcaggctcagctctcaccacgctgcaacttgccctggcttcacagcaggttctcgtgaccccgctgggagaacctgaaacgccggcaccgtggagttacaggcagtacccagccacaggagctcagccgtcgtggggtcacgagaccccgagtgcatttctttgctcagttacatttggggtccgctctgacgcacagctcatctcagctcctgcagtaacaagtcacattacgataaggctctggcggtactcaaatggctgaagcctggcgccaggcctcactgcagggtaaatgctgcacaggctccgccctccagggctgggggcgggttacctcagtttccagacagacaagactccaatccgaggtcatgctccgggacaggaggggaaaatttacaactttttagccaaaaccagaatttaaaatatctaaaacccagacctttcattgtaggtgatgaaagagttgcatggtacgtgccaacgtgttatagttacaaacccagggctccacttcccaggactgagtgtgtggcctcatccttcctaagccatcagcagacaccgcccgacggcctgggtgccgaccagagtaggaaagcataatcacacagcaacgctttacacatgacaccctccttacaggtagatgctgaggagatgagcagctactgtcctaaataatccctaacatctgagcagtcaccaagaatttcactgtaaatgtaccattattagtttatacattttatcactgaaaagatctctagtccttttcacatggcaaagtggtccagatggctagaccgtaagtggcaaattcaggcctatggccaccaggcagatatttatataagtcggcaaaataagcagggtttcaaccaaacactgacgcaggagataggctcagggccaggcgccagcaggaacaggtgaccaggggcatcccgcaaaggtgtgcacgtagacccagcgctgctgccccagacacctgggccagagctcacacatctgtaacttcaggaccccaaagtaaataaactaagttgaaaaaaatcaggaatctagacttttttacatgctacttctcaacttaaatgctggcagtgagttttcagaattgtttcaaataaacacatgtgaaatgcagtctgatttcagtaatttagggttttttgttgttgttatttagttttaagaaatttttaaaaatatactgcaggccaggtacagtggctcacgcctataatcccagtattttgggaggccaaggtatgacgatcacttgagcccaggagttcaagaccagcctgggaaacatggtgagaccccgtttctacacacacaaaaaattaaaattagccaggtgtggtgacacgcacctgtggtccaagctacttgacagcagaggcaggaagatcccttgaacctgggaggcagaggctgcagtgagctctgactctgccactggcctccagcctgggcgacagagcaagatcctgactctaattaaaaaacaaaacaggctgggcctggtggctcacgcctgtaatcccaacactttgggaggccaaggcaggcagaccatgaggtcaggagatcaataccatcttgactaacacggtgaaaccccatctttgctaaaaatacaaaaaattagccgggcctggtggcgggtgcatgtagtcccagctactcgggaggccgaggcaggtgaatggcatgaacccaggaggcggagattgcagtgagccgagacagcgccactgcagtccggcctgggcgaaagagcgagactctgtctcagaaaaaaaaagcaaaccaaaaaaaaccaaaacaacagactggatgcccaccgtctgcttaccaagcacctgggtgacacaggacatgcaggctggcctttaacgcaaaagcgtcagcactgctgccagtcagaccacagcagaaccttgactccacctgcatcttcactctctaacttgaagctctccttgctaaactcacagccccacgtgggactcagatggcacacggcaggcacaggcacacaacagctcagacagtgagtgcgcagggcacctgctcccaaggggctgagcgacgcggacgtggagggtgggaaaagcggggtaacggatgcttacacagttgcgtttcttgcataggaagactgagtctgagagactgcaaagcttcttttctaacactgccctcagcactagttccctgagacttccttaggttgtcatggaaaccagccacacctggagaggcatcagggcccactgggcttgtggtgggatcgagagacgacggagggtctgggaagggtggcgttggcccgttctgacagaggcctccctggccaggtccatccgggctttccccttccgtggatgctctgtttacctcggcacctggaaagacagagcacgctggaccaccatggctttaacaacaaggtgacgtcgcttttcagacatgcagctggagtaggagagaagaggatccagactcatgagcacggcactttctcatcccacaaaggcttcactctgagaggagcagcccatgggccccgtcccacaggcggggtggccaggataaggcccacagcccctctggtgtccacgtccttcctgtaaggtgaacctgccctccacacctccacactctaacgtgaacccgccctccacacctctacgctctaacgtgaactcaccctccacacctccacactctaatgtgaacccgccctccactcctccacgctctaaggtgaacccgccctccacacctccacgctctaaggtgaacccgccctccacacctccacgctctaaggtgaaccccccctccacacctccacactctaacgtgaacccgccctccactcctccacgctctaaggtgaacccgccctccacacctccacgctctaaggtgaacccgccctccacacctccacactctaaggtgaacccgccctccacacctccacactctaacgtgaacccgccctccactcctccacgctctaaggtgaacccgccctccacacctccacgctctaaggtgaacccgccctccactcctccacgctctaaggtgaacccgcactccacacctccacgctctaaggtgaacccaccctccacacctccacactctaacgtgaacccgccctccactcctccacgctctaaggtgaactcaccctccacacctccacgctctaaggtgaaccccccccccacacctccacactctaaggtgaactcaccctccactcctccacgctctaaggtgaacccgccctccacacctccacgctctaaggtgaacccaccctccacacctccacgctctaaggtgaacccgccctccactcctccacgctctaaggtgaacccgcactccacacctccacactctaacgtgaacccgccctccactcctccacgctctaaggtgaactcaccctccacacctccacgctctaaggtgaaccccccccccacacctccacactctaaggtgaactcaccctccactcctccacgctctaaggtgaacccccccccacacctccacactctaaggtgaactcaccctccactcctccacgctctaaggtgaacccaccctccacacctgtacgctctaacgtgaacccgccctccacacctccacgctctaaggtgaaccccccctccactcctccatgctctaaggtgaacccaccctccactcctccatgctctaaggtgaactcgccctccacacctctacactataaggtgaactcaccctccacacctccacactcttggctgtagaatttatgtagtaacgacagtaacatttcctcttctcttttttgagacggagtctcattctgctgcccaggctggagttcagtcacacaagctcagctcactgcaagctccactcaccagattcaagcgattctcctgcttcagcctccccagtagctgggattacaggtgcccaccaccacacctggctaatttttggtctttttagtagagatggggtttcaccatgttggccagtctggtctcaaactcctccccattcaccagcctcggcctcccacagtgctgggattacaggcgtgagccaccgcacccagccaatgtttcctttccatttaagtaaaaccaataagaaatcttatgaaagtcgccagtttaaaacaagcgaaaaccacaaacacttaaaacacagctgacaatctttctagcaggcactggtaacagcagtgttaatcagagtcacagcctcacatttacaaaggctgattttggagtcatttcaaagcctcagcttatcctccaaggcgaggaccctaaggcgaagaggtggatgatgtcatcacaccacccgtgaagcagagacagcccagaaccgcgcttctgcttgatgacagcctgctgggtaaaggcctgggttggaccagtgacaattctatacccacgtgttacctcagttcacccactaaaatgattatatacaaattacccacaacacaaactaaaacatatttcctcatcaaatggaacaaagaaagatttctttcaatgaagtgattttcagtcttttccctgccccctaactgctgactggtgggtgggccagttcacagtcaaagaaccaagacatgtgaggggggagggagggtcctcagggggttctggtcctggttccggtggctctggaggcccggcaacacctccgtgtctcacaggggtcagcattcctcggatcccacgtgcatgcaggacagcaaatttgctttttgctcaagcaaattaaaaatgagtttcttagccgggcgcggtggctcacgcctgtaatcccagcactttgggaagctgaggcaggtggatcacgaggtcaggagatcgagactatcctggctaacacggcgaaaccccgtctctactaaaaatacaaagacttagctgggcgtggtggcgggcgcctatagtcccagctacttgggaggctgaggcagaagaatggcgtgaaccctcgaagtggagcttgcagtaagctgaggtcgtgccactgcactccagtctgggcaacagagcgagactccgtctcaaaaaaagaaaaggtttctttcacttgcaaatgtgagttcaaactaacagcagatacttactgtcatgcctcccgaaagaaaaaccagaataaaagcaggggtgccagacaggaagccagaccacgggcacccgaccaacgcactgagacgcctttcatgcaaaggacccgtgagctccactgctgggagagggggaaccttgcatttcagataaaagttactgggttaggccgggcgcagtggctcacacctgtaatcccagcactttgggaggccgaggtggaaggataactcaaggccaggaattcaagaccagcccgggcaacagcaagactgtttatacaaaaagtttttaaaatgagccaggcaacagggcgcggtggctcacgcctgcaatcccagcactttgggaggccaaggtggggggatcaccagagattgggagttcaaaaccagcctgatcaacatggaaactccatctctactaaaaatacaaaattagctgggcgtggtggcacatgcctgtaatcccagctactcaggaggctgaggcagaagatcgcttgaacccgggaggcggaggttgccatgagccgagatcgcaccattgcactacagcctggacaacaacagcaaaactccgtctcaaaaaaaaaaaaatcagctaggcgtgctgacacgcatcgatagtcaccgctaccccagagaccaaggcaggaggatcacttaagcccaggagttcatggctgccgtgagctatgattacaccactgcacttcagcctgctcaatggagcaacaccctgactctaaaaacagtaataaaatgtttaaaatagaaaaaggggcggaggctgagattaacccagcgtcttgctcgagggcacattgctcctgagcagcagatctaagagcaggttccacggccgcgggtctcagaactcttgatcttgggcctctaagttgttatctgcctcacctgatgcttatgtagcaaggaccagcaaagccatcctaagcgcctgagtatcattttacaggaattagactgtgacttctgctagtaaattagcacatctgtagtctacagttttaaagcactgaacctcctggccaggaagaggcatgagaactgagtgaataactaagtcaccctttccctctgacacgtgaataacccagggggctaacataacactgtgctccgtaatccttagatctctacgggacgacttctgaattctagctattacaaattcagcaactgaccaatcaaaaaggcagaattcggccaggcacagtggctcactcctgtaatcccagcactttttggggctgaggtgggtggatcatttgagatcaggagttcgagaccagcctggccaacatggtgaaaccccgtctctactaaaaatacaaaaaatagctgggtgtggtggcaggtgcctgtagtcccagctactcgggaggctgaagcaggagaatcgcttgaacccaggaggcagaggttgcagtgagctgagatggtgccactgcactccagcctgggcgacagaacaggacaccgtctcaaaaaaaaaaaaaaaaaaaaaaaatggctgggcgcagtggctcacgcctgtaatctcagcactttgggatgccaaggtgggcggatcacctgaggttgggagttcgtggccagcctgaccaacatggagaaacctcatctctactaaaaatacaaaaaatagctgggcgtggtagcgcatgcctgtaatcccagctactcgggaggctgaggcagaagaattgcttgaacccgggaagtggaggttgcagtgaaacgagatctcgccattgcactccagcccgggcacccagagcaaaactccacgtcgaaaaaaaaaaaaggtagaattttaggcagggaacatgataaagacccatagatcccttcagggaaacactgctgctgccccacacgtttaatggagttctgtttagcaggaatgtgcctgatctaaaggtggcatcattcagttactaaaacatactttgggccgggcacagtggctcacacctgtaatcccagcactttgaggctgaggctgaggcgggcggatcacgaagtcaggagatcgagaccatcttggctaacacggtgaaaccccgtctctactaaaaatacaaaaaattagccgggcgcggtggcgggcgcctgtaatcccagctactcaggaggctggggcaagagaatggcatgaacccgggaggcggagcttgcagcgagccgagatcacgccactgcagtccagcctgggcgaaagagcgagactccgtctcaaaaaaaaaaaaaaaaaaaaacaactttgaattaagtgaaaagctcacagtggtctcaacgccacatcctccctcaacaccacgtcctccctcaacaccaggtcctcctgtgaccagcacacagaggaacctcacgacttacactggactttgtcctgctggtcaggtggcaccagtgggcccgggggcttcagtggggcctcggggagagacgaggggccactgtgggatctgtcctcctggaggccatcttgctcggccgacgcgccgtccatggtcaggacgacaccagctgagctgacgctgaggggctacaagtgaaccttggacaagcttggcttctgccatcagcaacagccaagagctcctgggaggggccctactgtgtctcccattttcaggagaagatctgatgactcacaaatgacttgatgtcaaaccagctaatatcatgatacctgacaggagagagagacaaaatgtattatgaaacttgtcagatttcaagtatcaattacaaaattagcatttggttcccaatttgcatacgtacaagaaacaaatacaaactttttcattcagcaaataatcctggagcacccacaacatcctaggttttgaggctaagatgctgacccagccacactgggccctttcctgaaggagcttaatgtctgtatcggtgccaactaaagaacattctgctgggacagcgcagctctgaatctgtggagtaggtgtcacacagggcaactgagctttaaattttatttaaaattaatttgggccaggcgcggtggctcacccctgtaatcccagcactttgggaggccgaggcaggcagatcacctgaggtcaggagttcaagaccagcctggccaacatggtgaaacccccacctctactaaaaatacaaaaaatagccgggtgtggtggtgaacacctgtaatcccagctactcgggaggctgaggcaggagagtcacttgaaaccgggaggcggaggttgcagtgagctgagatcgcaccactgcactgcagcctgggtgacagagggagaccccatctcaaaaacaatttaaaaattacaataccagactcacaggcccccctctcagctagtgagtgactctgcccaaggccacggctcctgccggcagccccaccccttcaggttggacaactcagatccagagaaacaaaactttaaaaagcaggtgccatgggatgtggtaactctatacagggtgtacaaggacaccagaaaggcagctgccttggagtgggggcacagaaagggcatctcacggcagggcccgttcccgtctttacctctagctgggttagctctctcagcctgccctgccgggctacattcaggggagcaaaactttgcccaacatttggcaagtgattatccaccctgaaatgtgctggtgatattattaactcatttccttatcaacaggtaagacactagcatgagcttccattcattctgcagaaatgttggcatttattcctttaaaatcagtttcatattaacctacattatgttctgtgtttaacatttttcatgagaaacattacacaaccttcgcctctagcttacaaatcccacacagaaggtatagacaagaagcccacatggggccgggtgcggtggctcatgcttgtaatcccagcactttgggaggccaaggcgggcggatcacctgcggtcaggagtttgagaccagcctggccaacatggtgaaaccccatctctactaaaaatacaaaaaactagccaggcgtggtggcaggcgcctgtaatcccagctacttgggagcctgaggcaggagaatcacttgaacctgggaggcggaggttgcactgaaccaagaccacgccattgcactccagcctgggcaacaagagtggaaactccgtctaaaaaaaaaaaagggctgcgtgtgatggctcatgcctgtaatcccataactttggggggtcaaggtgggtggatcacttgaggtcagaatttcaagaccagcctggccaacaaggtgaaacctcgtctctactaaaaatacaaaaattagccaggcatggcagcgcgtgcctgtaatcccagctactcaggaggctaaggcaggaacatcgcttgaacctgggagacagaggttgcgtgagccaaaattgtgccactgcactccagcctgggagacaagcacaaaactccatctcaaaaaacaaaaaacaacaaaaaaaagagaagcccacgtggctggtcctcgagagcatgtgtgtcactgaccccgcagcaggacgtgcctgtctttctaggggtttttactctacctgccatctagactggtcacccgtaaaagaggaaacctatgggtggtgggtgtaacccagtccactgacacagtcaatgactcactgaagggcgtgcagacctgtgagtatctgctcataactataataatccaccattcctctctgccaccttgcatcctacaggccagagacagttatgagttcataacagtgttgttcagaatattaaaaggttacgtatgctattagtgtaaaactagcattaagggtttgtaaccagaaagcactgtgaatagaaatgtgtcctaacattagtaactataaatctcgcatagctaatcaagaaactactgtaaacaaaggatcctagatgtcttgactcagggtgcctggcacataaaaatatttaaagattaaagcaatgtctgaagcacagaagtgaaggaagttaccaaggctggtcaaaagctaatcctgtgtgcaacgaattctcaatctcatgtttgcgtctatgatcatctagtaacatctctcatccctggattttccgggtgggtgggtgataaatgggccttagagcctaggcagggatctgaactacacacctgtccttacacacagcacagaaccctctgaaaatcactttccaggaaaaacactgcgatctccaccaagcctgcccctcagctacaatcccagacacactccaagagaactgggggtcagccggccacgcccacctgggaatggagaagacacccacaaaacaaggggaggagcatcagcaaaatgatggctgcttatcacaggcttgcccctttgacagatgaattacaaactggcacggaggactacacgcggtggaatgtggactcgactgcgccactgaatactggtaccctgtacatctggtcctcttgaaaatttcctagcaaaagaaaacttgcgttttgctttgtgatgtctttgcttctgccttgcgggggtggggtgattatatggaaccgaccgtgtgtgcctacgcgtgcagaccctcctggcccctcaggtaaaggaaccgacggtgtgtgcctgcgcgtgcagaccctcctggccccgcaggtaaagtgtctcgtctaccccctctgccatcactgtacctcacgtggcctccaccacagcacgtcatgtctgccattgcgtgtgtgcccattacatggcgagatccttgaagacagagactcattccccgtctgcctcccaccaccttgaacactcccaactcctaaagtgccaacacaggtttaatttgccgaattaaatcttcagttctgctgattctgctgagtacattcctctgctacaaagctaatggttccaaaacaaaatgattaagtatttgaatcctggagcatcaacactgccttttaaaatacagcaaagtctaaactagtccagctgaaacatctgtgagcttcagttccaatgagggagtccagggagttagaaactggaagagcaccttttttcagtggccgggaagatggcggacattcagactgagcgtgcctaccaaaagcagccgaccatctttcaaaacaagaagagggtcctgctgggagaaactggcaaggagaagctcctgcggtactacaagaacattggtctgggcttcaagacacccaaagaggctactgagggcacctacattgacaagaaatgccccttcactggtgatgtctccattcgagggcggatcctctctggcgtggtgaccaagatgaagacgcagaggaccactgtcatccgccgagactacctgcactacatccgcaagtacaaccacttcgagaagcaccacaagaacatgtctgtacacctgttcccctgcttcagggacgtccagatcggtgacatcgtcacagtgggcgagtgccggccttgccggcctctgagcaagacagtgcacctcaacgtgctccaggtcaccaaggctgccagcaccaagaagcagttccagaagttctgaggctggacatcagcccgctccccacaatgaaataaagttattttctcattctccaaaaaaaaaaaaaaaaaagaaactggaagagcagcatcacggccacggcccagacaggcaccaccacctgaacagaaggaaggatgggatgaccagcaggactggactcagccattacaggtggaacatgcagaggagaactgctgcagaggagaactgctgcagaggcccacagtgacgacgcctgggccttacactgaccaagaaggaacacagccaaagacgctcaggttccaccgagagggcacgccaacatggtgacagccaaccgcaccgagctgagtccagtgcaatcacagattctgctcacttaattcccctgctggtgtccaagcagcccacctctccagaacagagaccccatgacggtgactgtaagtcacaaagacggcccctctttacaggcagctcctcctgaagccggaccagagagagaattcactaactgcctggagtttggtgacagtgatacttctccctgtagggcaataagctggcagtctcggtcgattcccagtcttgcttgatttttagttaaaatttggaatgactcagtcgtcagggcctcattacctcagactactgacaaaaagcgatctccgggcagcgaggaggaggagcaactgccagtgcatcacagaaagctggtactacaaacatggctctattttaaataaagaggccagtctaatcagtctcacttatgatcactcgcactcctgcgtctctagagagaagagacaggacaaagctgtcacttagaactgcgaaaggtacacacaaccctaggttcacagctgggtaacatcaagggacttcatactgagaaaccaccacctcaggcacctacaggactttctgcttcccccacacctgaattctgtatacaaacattcacggctccatctacaccacctcgtttcacctgttcctatcgggtattagaaacaacagagcacagccaaaaaccaaacacgatttcctcaggaaaagagtacctggtggaggccacactagtatccaaaagtaaacacagatctatacacaaagtgaaaaccaaaagcaagcaagcctcatgtcactgcagagacgtgaagggcaggcttggaagtcaggactccggcctcagctcccgaccctccaccacttacctgtgagagcctgggctaaagatttcttaatcacatttagcctgtttcctcaccagtaaaacaatgagaaaatgaacgcaaaattttgccaggattaaatataacaaggcacagagtctgtcccgtgtcctcaataaaatgacagtaattatcacgattttccctttagttgttgcttgtcaaaatcgctaaaagccaactgaaggcattctcacttgggaaagtatgctacttcttaaggcaatcgggggaaaaaaagctcctcttcaatctgagtgatgtcagatgatttatttccttcttgccatttaaggtatactgcctgaaaagatattaaagggttataaagcgctatgttgatgtcgtttaaaagacagttcaaaataatccacgacgacgggtgtggctgctcacacctgtaacaccagcactttgggaggctggggtgggaggatcgcttgaggccaggagttccacaccagcctgggcaatacagcaacacacccagtctcttaaaaaaaaaaaaaaaatccatgagtcatctgtaaatggcttacactggcccagtgacaataaactccaacctcttaagaatccagcacctgcctacaccaacatccttaccgccatcgctttccccctttgccattacactgtggccacatcctccgccctcagggtcttcaaactttctgcctgaggcgcgcttttctcacaattttgcctggcttgcttctcgtcatagaggccttagcacggaagtcgcccgccccccaggctcccacttagagtagcggaccccacccaaccaccgcccggtaccctctcgctggcgaccctgggtgtccctgtcctaggtgggctccgcgggggcagtgacccagacccacaatacccaggacccgccacacgactgacattcgtcgggttcatacccgtgacaacgcccggccccactcgctctggccacctggaatgaagacaagtcggccagcgacaaagacaaacaaggaagtacacggactcctgaaaccccgacttcccacgaaccacccgacaccatgtcacgcctttcagctgcaaagggccaggctaaagcaagcactgcccgagtggtggcagtggacagcttcgggacaggccgcgctcgtcgggcgcagacaagcattcaggagggctcgcgggcaccggcatttacagagccagctccgccgcagctgaaggcgggcgcccaggcccgaggccaccgcagcgaggcgggggtgactggaacggggccgtcccgccacgctgcagggacgcgcccaggccccgccgccgcccctcgagcctcccccgcccatgcactgcgggagcgggagcgggagcgggagcccgagccccgaggcgccgcggcctccgagcccctcaccctgctgctctggcagccccggaggccgcccggcccggatgctccggcggagacgtggccgtgagaggggcggggcgagcggtgcatcggcctcgggtccccggaaacagcctgcacgcgctactttcgttccggaacagagaacgtcctcctcttcttcaagtggccaccctagggccggggaccctctgcccacagggtccggatcgagctcacctccgactgtgatgaggccgccttcagaaagtgaccttaagagtttgcggacctttccctagtagaaacgcaacttccggaactgcaggaccaactctttcaggaagctgaaccgagcttccggcggaagtggcgtggccggggctcggcatgggcgcggccgagctcggtgtgggcgtgacttccccgcccgccctagtcgggtccccgccccaaccccgcacctccacccggccggcgcccttcgcgcttcaggtgccagatcaaaggcgacgctgctttggaccctatttgcttcccctttaaaaagggcaaagctggacggcgcgggccgctggccgctggggaacggctttccaccttccctcatccgccaggccgctcttccagctgtcaggaaggaaatggcctggagggcgcctcggggtcctctgtgatgttgcgctcatctctgcggattttggaatacgcttcagtctacgaagttttctgggattttgatgggaactgctgcagatcgtttggggagcacgggcatcgctgactcggtccttcatctgcgtccctggtggcccctccatttatttcggtcttttgatttcttccaccagcattttgtaatttcagcatacagattctgcaccttttaagtttatagtatttcacatcaaacaactgtaacactgcgtttttgacgttttccacgtgttcactgttggtctacacaaatgtgatgaattctatgttgattttcttatcctgagacctcgctgaactcattagtttgagggttcatttggtgttttgcggttgttgttgtaaaatccttgtattttttacatgggccatcatgttatctgcaaatgcaaattctaacacaaaatgatcagactgaggcgtaaaatatacaacttttagaagaaaacagaatttctcacatctagagcttggggaagagttcttagatctgaccaaaaaaacacaattcacaaaagaagttgatagagtaaacttcatgaaaaaattagaaacttttcaccggatgcggtggctcacgcctgtaatcccaacactttgggaggccaaggtgggcggattacctgaggtcaggagtttgagaccagccaggccaaatggtgaaacccatctctactaaaaatataataattagccgggcatggtggcatgtgcctgtaatcccagctactcaggaggctggaggagaatcgcttgaatccaggaggcggagaggttgcagtgagcggagatcgtgccaccagcctgggcaacagagcaagactccgtctcaaaaaaaaaaaaaaaagccgggcacagtgtctcacgcctgtaattccagcaccttgagaggccgaggcaggtggatcacaaggtcaagagatcaagactatcctggccaacatggtgaaccctgtctctatgaaaaatacaaaaaaattagctgggcgtggtggtgtgtgcctgtagtcccaactactcgggaggctgaggcagggggatcacttgaacctgggaggcagaggttgcagtgagctgagatcgtgccactgcactccagcctgggcgacagagcgagactccatctcaaaacaaacaaaccaaccttgtgagaaagaccacattaagaggatgaaaagatgagttacagactgtgagaaaatattttcaaaccacgtttgttgaaggactagtagctagaatatataaagaactctcaaaacttgacagtaaaaaaaaatacaattattctgggcacaatggctcatgcctgtaatctcagcactttgggaggctaagggggcaaatcacttgaggccaggagtttgagaccagcctggccaacatggagaaaccctgtctctactaaaaatacaaaaattagccaggcgtggtgacgcacacctgtaatgccagctatttgggtggctgaggcacaagaattgcttgaatctgggaggcggaggttgcagtgagctgagattgtgtcactgcactccaacctgggtgacaaaatgagactccatctcaaaaaaaaaaaaaccatacacacacacaaacagaagacaagcaaaaaacatgaaaacacatttcactaaaaggatatatgagtggcaaataagcttgtgaccaggttcagcatcactagccattacagaaatgcacattaagactatcttgaggtcaggcgcggtggctcaagcctgtaattccagcactttgagaggccgaagcaggtggatcacctgaggtcaggagttcgagaccagcctgactaacatggtgaaatcctgcttctactaaaaatacaaaaattagctgggcatggtggcaggtacctgtaataccaactacttgggaggctgaggcaggagaatcgcttgaacctgggaggtggaggctgcagtgagctgggatcacaccattgcactccagcctgggtgacacagtcagactctgtctcaaaaaaaaaaaaaaaaaaagactgccttgggatattagtatacacctattagaacagctgaaataatatacagcagtggcaatatgaaatgctgggaataatgtattctggagtaactaatctcttatacattgctgatgggaacagcaatagtgcacccactctggaatatagttgggcagtttcttcaaaaagtaaacaattttatgacccagcaactgcattcctagacattgaactcagagaaataaacttatgtctacacaaaagcctgtacattactgaccccaaactggaaacaaccaaaatgtcctctgacatggtgaaacaaaccatggaccccccacgccactctgacatggtgaaacaaaccgtggaccacccacgccactctgacgtggcaaaacaaactgtggaccacccacgccactctgacgtggtgaaacaaaccatggaccacccatgccactctgacgtggtgaaacaaaccgtggaccacccatgccatggacactactcagcaataaaaaggagctgaccactgatgtgtgcaataacttggacgaagctccaaggcattacatccagggaggaaaacatctccgaaggtctacactgcatgaactgtacgatgtgtccacttatgtcacaaaatgacagcattatagagtggtggtggggttcggatgactaaaaaggggtagatggagagagatttttgtggtgatggaactgttctgtattttgtgaccgtggttacgtgaatgtcctcatgtgataaaatgacagaatgaagaaaacactccaccaagctcagtttcctgattttcatattgcactatcctaaggtgtagccaatgggagaaatagggaaaacatttaattagcataagatctagtattccatagcacaggagggtgaatatagttaataataatgtattgtatatttttaaataacaaaaagagtggaactggaatgttcctaacaaagaaatgatacaggcttgaggtgatggataccccagttactgggagttgatcattatacattgtatgtctgtattaaaatatcaaggtactccataaatatatacaccttttatgtacccacagtaatttaaaattttaaaaatttagcaagcaaaatgtgacaaacattaaatttaaatacagttagaaacaatgaatctaatcatatactaagttgatggcacagtgtgggaaaaatgctaatctaagtaaaattcttaacagctttaatacaatttctatgcaataaaatatacccgtgttgtgtgtgcagttcagcgactgtagtaaatgtgcagagctgtgcacccatcactccaacccagtttccggatacttccgttacctcagaaggatccttcttgcattcactccctatcccctccacccagcccgacaaccactcagtcaccttctgtctttatgaatgtgcctcttctggacatttcatagaaatgggatcatatcgtatgtggccttctgtgacgccttttcacttgcatggtgtgtttaaggtccatccacactcagcacgtttcctcgctgcacgatactccagtgtctggatacacccattttgtctgtccatgcatcagctgatggacccactgaggtgccttacgcgagcccagcactattctgcgtgcggggggtccctgctttggtccagtttcatgtttgtgtgtggataccttcagagggcggtaactgatgaaaagaaaataaaactgggtgaagcgttcgagcgagaggggctaccatctgcatggggccgtcattcatatttatcgtagcctactgtctgcaagtactattctaggcactgtcccaaatccctgctcttacagaaggtatattctagtggggaccagacaacaagcatagaaggtgacagaaagagtcaagaaaaggcagaggcaaccctggggaggctcgctgctatttcaggccgatggttgagggaggacttctcaggagaatgtgagccaacaagtaagaaacggagttgctgggcgtggcggcttacgcctggaatcccagcactgtgggaggtagaggcgggcagatcgcttgaactcaggagttcaagaccagcctgggcaacatggtgaaaccctgctctctactaaaaattagctgggtgtggtggtgtgcacctgtagtcccagctactcaggaggctgaggtgggaggatcatctgagcccaggaggtggaggctgcagtgagctgacattgcgccactgccctccagccctgacaacagagcaagacactgtctcaaaaacaaaaaaagaaaaggaaaagaaaaaaaaggaatcatgcaggtactggtgggaacagtgtcccaggagagggaaaggcaaggagaacgagtactcaaaggcacctttgaggaagtaatatttgagctgaacgtgcgtgacaaggaggaccaatgcacgcacagatctgggagaagagcagtgaggtgagggggcaacaatcagagccacaagaagcccctgaagagaagcctggggcactgaggacagccagcaggatgactcctggggttgggcctgagctacagggaggccatgccatcttctgacagtggagagggcaggtctgccgggcgtacgtggtgggcctggggtccccactggaaacagctctctttgacaacatgaatctgggatgtttgaacaccaagtggagccatcaggtcagcagttagagctgagtgtctgccacagagacctagagctacagggtgaaggaacgtgctggggagcaggggagagggtgaagcggatgttgggtgctcagccatgccccacactccacctccaaccacagcacctctgagacagactggacccttcctgaaaacaaaaaccaaacgggatgagtgtgtggggggtagtgagcttcctgtggctgctctaagaagttaccaccaactttgctgcttaaactagatttattctcttgcagttctggagctcggaagtccaaaatgaaggggcaggcagggctggttccttctggtggccctgcagggagatctgttttcttttctgcttcgacagcctgccctcctctcctggctggaggcccttgctccctctgcaaagcacatccctcccacctcttctctgtcaccaagcctcctcttcctgcctttgacttcttgcttgctttttttttttttttttttttgagatagagtctcgctctgtcgcccaggcgggagtgcagtggtgcgatctcggttcactgcaagctccgcctcccgggttcaagccattctcctgcctcagcctcccgagtagctgggactacaggcacccaccaccacgcccggctaattttttggtattttttagtagagacggggtttcaccatgttagccaggatggtctcgatctcctgacctcgtgatccgcccgcctcagcctcccaaagtgctgggagtacaggcgtgagccaccacgcccggcctcttgcttccctcttacaacgactcctactgttgcacagagggcccacaagctaatccaggatcctcccctcatctcaaggtccttaattccaccatatctgcaaagccccttttacggtgcaaggcaacatcatcacaggctcaagtgatcggatacgggtatctgtggtggcgggacggggacatggctcagcccaccacggagtgtcaatggtatccagcatgtggggtttgccaaacaacaacaaacaaaaccacccaatttttataaaaccccgtggcgtgcgagctttgatggcagagtgttacaatatgttcaagccctaaatcccaggacctcagaggtgactgtatctgcagacatggaacacgtcatgaatttgggtgtcatgcctgcacgtgggccatgctaatcttctctatatcgttccagttttagtaggtgtggtctttaaagaggtgattaagataaaatgaggccactggtgtgggccctaatccaataggactggtgtcctcgcaggaagagattagggcacaaacacgcatgaagagaagatgacgtgagaactcaaggagatgctgcccacgagccaaggagacagaccaaagaggaaccggccccgctgacaccctgatctcagagttccaggccccagaactgtgagaaaatactttctgttgtttaagccgcctgttctgcggcgttttgatccagcggcccaagtggacccacattcaaggccagcactgggcagggcgggtctcacaaatgcatgctcccagcacagcgcacggccctcacagtgccaggctcccagcacagcgcacggccctcacagtgataggctcccagcacggcgcacggcactcacagtgccaggctcccagcacggcgcacggcactcacagtgacaggctcccagcacggcgcacggcactcacagtgacaggctcccagcacggcgcacggcactcagagtgccaggctcccagcacggcgcacggcactcacagtgccaggctcccagcacggcgcacggcactcacagtgccaggctcccagcacggcgcacggcactcacagtgccaggctcccagcacggcgcacggcactcacagtgacaggctcccagcacggcgcacggcactcacagtgacaggctcccagcacggcgcacggcactcacagtgccaggctcccagcacggcgcacggccctcacagtgccaggctcccagcacggcgcacggcactcacagtgccaggctcccagcacggcgcacggccctcacagtgacaggctcccagcacggcgcacggccctcacagtgacaggctcccagcacggcgcacggccctcacagtgacaggctcccagcacggcgctcggccctcacagtgacaggctcccagcacggcgcacggcactcacagtgacaggctcccagcagggcgcacggcactcacagtgacaggctcccagcacggcgcacggcactcacagtgacaggctcccagcacggcgcacggcactcacagtgacaggctcccagcacggcgcacggcactcactcctggtctgactggccttcaacattctctcctgagtccattccttccacagacatgcacgaccaagtgtctgctctgtgtgaggaactttaagaccccaccatctagactcaccgcctcagaaggagacaaccgtgaaaagtgagcgacagaggaaggggcgcctgtttgtgccgcgggaaagatttcaagcccaggggacggctcatcagctcatcagaccttcaccgttcagtagccaactggtcagtgatcagtagatgctgccctggggccaaacatttcagacaaataaacaacagtgggcagacaggcaagatccctgctctatttttttgagagggggagacaaacggtaaacagatgtttcctttccgatagtgacaggtgctggggggaaactagactggctggcggggtgggggcagccctgcaggagctgaatgaggagaggctgcagagggaggggctggtacctgaggggctgtttgtgagaattagctggttcggtggagaagcagaggaacacctgaggggctccaggagaagcaggtagggagaagaggttttctgaggggtggaggcaggggtcatacatgctgggccttcaagggccatgatatggttatcattactatgtaataaaccaccccaaatgcagtggcttaaacaactacttatttctcatgattatatgctggctgcctggtgcagcactgtgctggtgtttaacaaccttctcttcagaagaaaacaaaagcaaaattaaaaaccaccctgatttgaagcatttaccaatttccacagtgcaaacactcctcccagggcccattccaaccaggccaactgagctgagtgggtaaggctggaaggggtgccatcccacacaggccacagaagcacacaccctcgggcctgcaggtaacaggcaggtgcggtaaactaactagaaagtagtgcgtcctgagcactcatcacctttgttttcagtgtaactcaattctaagtgtagaggatgcttgaataatggctgtctaccagttaccagcactaggcgtttctggaggtggctcccccgaagatcacccggctccgtcctgctgctggtcagcgcgcggatctgcagggctaggctgtgctctgcatgcggccctccgtcctcagggaggcaagacccggcttctctacacggctgcagccgccctcagaaggcgcaggagctagcgtgcatgccaaaacggagcccacgtggaggcagagggcgggcacggccgcggggacagcgttctggtttccccatcaagccaggctggagggacgatctactttcctaaatcccctccgttctcatgctttccttcccttcccagtgcagggctcccggcaacctagcggccctggcagtgactctggggcctcttcagggagccggctgcagctgcctcagggccagcattgctccactctcccagcctgccagcccgaagctggggggctgtcaccaggaaacccttgctggcggaagccccttccaaactcagctgcctctctgccttggccacacccctggggtgaaggccgtgtggtgctgggagcagcccctggaccccggctctcacacctgggcccgaccactcccatcctgctggccctgaggtcattaagatgacttaaagcagatttaaaacagcctttgtagctggcctagggaggagggttggcctgaatccctcagtctgttttaagccaatctgcccagacttcctggctgcagtcagaagctatgacagaggccatcccagagaggcctcactggggtggacgggttcacctagaacctgaggcccccttccctggcttggagcctgggcagcacacggaggggtgggcagggctgacccccgcttctgaggggcaccagggagcacagagggagccgcagatgaggagtgcgtggggagacggtctgtggggccagcgggcagctgcagccctgccctgggtttgtcccaaggctgggccaaggagccaggaagaagcagtgggatctgcagcagcaccaggctgtcctccagaaagcctgtggacgacccacgcagccaccccacaaggagagcagggctccaaaaccaccacagccggtcagttttgctgggtgggatggctgggtcttgaggacgaggaagtacagaagctcatgaaaagacggaatgagttcacggccacctgcttccataaaacacagctc

SEQ ID NO: 409 - DNA, 47366 bp, Homo sapiens
gtttcaaaggagaatttagagaagtttcaggatgacagatccagaagtaattatcaaaggcatagggggacatccttctactgggagaagtccaccttggtccttcttcaccaacttgaagcaaagcttcctgctgaatggaacctgtcccctcaagcaaaagtctctatgggaaaccctattggtaccagtggtgtaaaggcaggagcagagctagggtaggaaacacgcagatgtggattgggtctggacatgtaggcaaaagtgcttggaccaagatctgttgacttattttactactaacagggtcaggtgcccacctcacctgtaagctctgactaattttgcatttctgaattgtgtggtgtccgcatccctgctaatgagcctagtcccataagtacatatgtatgtatgtagacctgtgtgtgcatagtcattcatccaacaaaaattgactgagtgccaggcactttgctaggtgttgggagatatggcaggggtcgggaggaaagacatttcacctccttcatagatgtcgctatctagatggggagacagtaatcaagtagacaactaaacaaaataacaggaaatatgtactgtgtgggaaagaaacatggtgttgtgatcaataataatagcagggttgggggtagcaatctatcagatactgttcaggtaaaggctttccaagaaggtgacatttcagctcagaattgaaggatgggaagggaccagccaagggttcctcctcagcctgaggccaggtgagaggagttctggggtagagatgggggtaggatggcagggtggttggagtactcagtaagcttgggttctgctcctgttctttctgttccattccatccttgaagggccttctctcccttcctgtactcctacctgcctgtcccacctcattccctccaggggcaaggtacgggtgtatcttgtccccatcttgagctgttcacagttcttccctgcccatccctgcagatctcatggaaccaagggattgacttgtggtggcatgagctcatgcaagaggcaggggatgagtgtgagcccgagtggtgtgatgccgaggacccactcttcatcctgtacaccagtggctccacaggcaaacccaaggcaagtgtgtgtgtgtgtgtgtgtgtgtgtgtgtgtgtgtgtgtgtgtattatgtaggggtaagaagtaagtttctgaggaaacaagtaatgaaattatttttttcctacaaccctgagttttggaaatgtagcattgtcttttctaaatcaaattaagacataaatcctcaatctataggtggtgaggcccagggtgagacagttcaggtggagggttttcatacagctgacatggatgttctttccctatgcacccatggtttggttgaaggagagctattctgttaactcaaggccaagggtgggcacagagatccctctcaggcttctaagaccataactcttagagttcaattccttccacctggcacactattaacatgtagtcctctgccagcacacaccatgggagccggaaacacttaagaaaactgtttcttccattgacttgaaagctatgtcactctaccttctgcccactccacccctaaattatctccatatgctttggaatatccctcaataagtctttagaaacacaattttggcctctctttcatagagatgggggtagggatggaataagcaaagggaattatcttttttttcccactcactctgatggtgtgtaattgagtgtgtgggcacaaatacacaacagagggactattatgagtgtgctatgagtgctcatgtgtgagtgatgtgggtggctctgaaataccatctgagggtgctggtatgaatgatggcctgatagacatatgtgtcatcaggagtgtgataaaggagatgagatgggagcatggagaaaaggagatggaagggagatggatgctgtgaaaagggtgctggcagggctggaatccctgaggaggatcttcctccagctctgcccagcctccatttggtggtcagtaggggtgggcataagaccctaacctgttccccattcttcccacagggtgtggttcacacagttgggggctacatgctctatgtagccacaaccttcaagtatgtgtttgacttccatgcagaggatgtgttctggtgcacggcagacattggttggatcactggtcattcctacgtcacctatgggccactggccaatggtgccaccagtgttttggtgagaagggagccacctggcctagctgggggatggacaagattatcctgggtgactacctcccaaggctgcttggtctagagggagggggacttatacaatcatctgttttctggagaaagagaagtcctgagggggttgcgtatcctgactaggatggtatcttggcttgtctggccagggagtgaagatatggttggtcagaaagggcaaaatactgaacctgagggaatggtagggggatgaatagaaggactattaggaaagactgggaatgaccagccttcatgggtcagtttgaggggattcccacatatccggacgtgaaccgcctgtggagcattgtggacaaatacaaggtgaccaagttctacacagcacccacagccatccgtctgctcatgaagtttggagatgagcctgtcaccaagtgagacctcttcccagttgctgccctgtgggtatccctcagagctgggtgctggcctttgtacagtctcttcttttccattgtcccaactctctgacctggaatagaggatggggcaagagaaaagcctgggtatgtgtgtcttccagtagtactcagagccttcctctctcccattcccctgccccaggcatagccgggcatccttgcaggtgttaggcacagtgggtgaacccatcaaccctgaggcctggctatggtaccaccgggtggtaggtgcccagcgctgccccatcgtggacaccttctggcaaacagagacagtgagtgaagggtacagaaggctggggcccagggacaatgtgggaagattgactcaaatttctcatctctgacttccccagggtggccacatgttgactccccttcctggtgccacacccatgaaacccggttctgctgtgagtgatgcttccctggctggtcttgggctaggcagggatggtgtcttggggcacttggcctagttagatagtggagaactggactgacatgtgtgaagaatttggggttctggggccccttgggagttgagtcagagttgcctcattcctcttcttgggttctgtctcccgtttgcttctagactttcccattctttggtgtagctcctgcaatcctgaatgagtccggggaagagttggaaggtgaagctgaaggttatctggtgaggccctggcccttgggagtctttaaggagagagggaaagggtctgccaagggtactttgctttagagttaataacctaatctctcctggtagctgcttaggactgaaacttcatggttggaggtttgctcactgagagaccctggaggggaccctcgatactttgcctgcatctcttccttttgggccataagtctcctaagggcgttttaagagttgctcagattcctgatggtacctttttgggtctggaagactaagtcccatcttcttttgacaaagattctacagaaaggaggctttataacatagtagaaaatcacgtaggatctggagtcaccctgcctgggttcgaatcctagctctgcctcttctgtgacctcagataagttatttaacacctctgaatctacattttctaatttgtaaaatagggttaaagtggtgtctctggccgggcacggtggctcacacctgtaatcctagcactttgggaggctgaggtgggcggatcacctgaggccaggagtgcaagaccagcctggccaacatggtgaaaccccgtctttaccaaaaatacaaaaagtaactgggcgtggtggtggacgtctgtaatcccagctacacgggaggctgagacaggagaatcacttgaaccggggaggtggaggttgtattgagccgaaattgtgccattgcacttcatcctgggcaacaagagcaaaattccgtctcagaaaaaaataatgcctttgtctcctatggttgcttgcttgattgagttagataatccacatgaaggggttagcagagaaactaacaattagtacttgataaacattagctgttgtgattattgtattcatacttgcaggagcctcacctgtcccttcaaccccaccccatttcactttcccaagagcaagttagtaacagggacagggcttacatccaggccttctgactcagcctagaattccatccattccatcgatctgctgccaaagaatgttactgattgggcaataattatttacttggtgtgtgggcaccactgttttttaaatgagtgttttcatttgtatcaaactggacctgctttcctcaaggattgcccaaaaggagacacaaatttactaaacacttatcaataatagaacaccgtgctaggcaatttccatatactattaatttaatcctcacaataactttggaagacagaaagtattttctctgatttacagatgaggatcctgaagctcagaggggtaaagttacttctctgaggtcacctagctagtaagtggtagagctgggattccaagccaggatcctctgtctccaaagcctgtacttcattcaggacactttcccccacatttagaaaagctgtaattatcttccagtgagacagcatagcaaatgtgatcactgtcccttcctcactccccaggtgttcaagcagccctggccagggatcatgcgcacagtctatgggaaccacgaacgctttgagacaacctactttaagaagtttcctggatactatgttacaggagatggtgagccttagctatccccctcttgcacctcccactaagacatgtaccttccacttccattttcaggaagagttggtgtgttgctataaaataatacctgagactgggtgatttataaagaaaagaggtttattttggatcatcattcttcaggctgtgcaggaagcatggtgctggcatctgcctatggtgaggcctcaggtagcttccaatcacggcagaaagcaaagggaaagccagtgtttgacatggcaagagaggaagcaagggagagagggaggagataccagcctcttttaaacaaccagatcttacatgaactcatagagttactgcaagtacagcaccaagccattcatgagggatctgtcccccccgccccccccacctccccggccttgaccaaaacacctcccaccaggccccacctctaacactggggatcatatttcaacatgagatttggaagggacaaacatccaaactatatcagttggttaggggtaaagaaaattagagaagaatgtgtcctacatgtcagtatctggtttctacgcagagctacaaagactgtaagggcaggaatgagtatagcaggaggggtctcagaatggtgccatccgaactttgatgtatgaggaaagatggacaatgtatgctcctgtgttgaaagagatggggcatgtggcagtgcatgactattatgtcatgtttgtctttatgtctggagtctgtgtttctccatctatccatctaccaatccattcatccataagatctgagcactgtgatcctgtgcccaggcactgatcatgaataatgtagtcaaaatctcctccctcatggggattctagtaaggggagacagacaaacccaacaaacataaataagcttatcttagatagagataaatgctgttaagaaaaataaacagggtagcatgatagtgtgtgcagggatggctactgtacacaggatcgtcggagaagacttctctgaattgacatttgagcagaggcctgaagggtgagaaggaaacaggcatgggaaaatctagagtaagagtgttttgtgcagagggacacagcttgagatgtctgaagaatggactgaagcctgtgtggctggagcgtagcaagcaaagggaagaatattacatgacgttggagacgtacataatacagggagggtcttgtgggccatggtgaggagtttgaattttattcaaagtacagtgggaaaccttttttttgttgttgttgttgttgttgtttgttttttttttgagacagaatctcactctgtcacccaggctggagtgcggtggcacgacctcagctcactgcaacctccacctcccgggttcaagcaattctcctgcctcagcttctcaagtagctgggattacaggcgggtgccaccatgcctggctaatttttgtatttttagtagagacggggtttcaccatgttggccatgttggtctcgaactcctgatccacccaccttggcctcccaaagtgctgggattacaggcatgagccaccatgcctggccaccttttggggttttaagcaggggagtgctaagaattgatttactgtttagaaaataactttgctggatttatggagaatagagtttaggtgagtatactattggcatggaacaaattatcccaaaagttggcagcttaaaataacaaatattatctcacacagtttctgaggatcaggagtctgtgaacagtttcactgggtagttctcattctgggtctcttgtgagtttcagtcaagctgttggtagggcctgtagtcatctgaaggtttgagtgagcctggaggacctacgttcatgcttactcgcatggttgttagcaggaatcctcagttcctcacctcaccataggactactcaatacatggcagctagcttaccctacagcaaatgatctgagacaatgcaaccgagacaagctaggtgtcttctacaacctaatctcagaagtgacatcctatcacttctgccaaatcctatgatgacacagactaaccctagtacaatgagaaagaggactgcagggctatgaataccaagaggcagagatcagtggtgccctcttggaggctggctactacagtgggcaagagtggaagcaggaagacttgttagaaggctattgcagaaggtgtagcagtttggtaatgtggatcaggtatcctaccgtagggtttttatttattaggttttgcatttcttcccaggctgccagcgggaccaggatggctattactggatcactggcaggattgatgacatgctcaatgtatctggtgagggccaggggccaccttcccatcttattaactctgctcctctgacaacacccagccgaagccttccgcaagagcccaggagtgtcctttggccagaccatgtactaagtgtagcattcagttctgggcccaggttttagaggagtaatgaacactggaatgtgcctagagtaggggaacttggatggtggggtgactgaaagcatgtcatctgaggagtgaatgaagggtcttctccatttggccagaccaggactgccccatgggtacagatggagcatgggctggggcagagcctgggatctctctcatggcacttcctttcccttgacaaggacacctgctgagtacagcagaggtggagtcagcacttgtggaacatgaggctgttgcagaggcagctgtggtgggccaccctcatcctgtgaagggtgaatgcctctactgctttgtcaccttgtgtgatggccacaccttcagccccaagctcaccgaggagctcaagaagcagagtaaggagcctccctgggcagggactatagggtctgtcttggaggcccagttatcactgcaagttgttggggaggggctagagcaagctgctccccaaaccacaaacagattccagggggccccatgggctgattgccctcttcctgttcagtctccactagtctcccactaggataataataatagccaacatttctagaatactttgtgccaccgctaggctaagtgctttaaatgaattaccccacttaatccctagagtcacctccatgaaacagatcttattgttaccttcatgctaaagatgatgaaactgagactcatggaagttaaatcacttgcccaaggccacactgctagaaaggtggcatttaaactctagcaggctcattctacagcctgagttccataagataaaatgagagagtaaagagacaagtgtgttgagagcaagagaagcagtgaacctgaggctgtctctgtgggcagggacttgaggaggaaacaggtggggaacaaagccatctctactttgatttttgaaaagtctggctaagggtgctgaagaaatgcttgatgatttgttggttacagttagagaaaagattggccccattgccacaccagactacatccagaatgcacctggcttgcctaaaacccgctcaggtatgttcagaggcctccatggattgggatgggctgaggcctggtggtggtggggtgtgcgtggatgaaagcctttggcagggctagggtgggtcagtgctttcaccaagtaactagaggtctgtggttccccagggaaaatcatgaggcgagtgcttcggaagattgctcagaatgaccatgacctcggggacatgtctactgtggctgacccatctgtcatcagtcacctcttcagccaccgctgcctgaccatccagtgaacatgatcctgacctttacctaggattcctcctgctccaaactttgcccatcctctttgccccctcaggagtgctgagggccagtgttgacccacactaccctcccttgaccagctgtctgggaccggaaaccagctttgtctccaggtagagacaacatcctgtgactgccaggcagaaaggacagggcccaggtcagcctcagtctgctgtgcctccagactgcagagctctcagaacccagaacagagacgaaaaggctacctctcctacccaagttaagtgttcaaaggggatgtgagggcctccactgaagcagggaggcagctgtgtaatcctatgtcagctctcttaggaagccccagtacttatattgggcatgcacttgcccttaaaaacaatgatttgtgagtccaggaacaatttactatttttaaaatattttgctgcttctgttctgggtctgaattcccttttgtgccagatgccagtactgtctgcccattggctccaggggctgtatgggcagattcagtctccagagggtattcagatcatctgcttctttgaaggagtaaatgtgttttgttcctagggccagaggagcttgtcttccttgtcctctgttcccaccctcccctgaacagaacccagcccataagagacattctcagatgaaactctgttttcttgccccagtcaggctcaagccctgtggttgtaggaataaagcctgtgatctcaagaagtggtgacttgttttcttaggtatctgtgccctgaggctgtatattcattagtggctctgatttgtgtggcagatgggaagggaggggtatttcctaggactatccccaatatcttccttctagaacttttggtttgggcagagcgaaggaggcttcactgacagggcctttgacaagcccctgagctaagcaggaaagtgactgaagccagttcacaactgttatgtatgtcccatcttggttgccttccctcctgggctcctgccagggactctcattcctccctgtgatccagtaagagcattagtgggtggctaaggattgaaacttcagggttccacctgtagagactggtctagggggaccctgattacagaccagtcacttccctgctctaatacatcttaagtgggctaacgtagattacagctcccgcctcccctctatgcacgaagtaaggaatcatcactgaatcagcaatgcagttttatttaaggcagaattagggaaaggctatgcccctccactccccctcctcctaccactcagtcctatcccaagtcaggcactggaacctgctgaaaaggctgatgaggggctgacaggagtggggcagggttcatggacctttacctcagagcagcttaccctgagctatacccacatctcaaggatttgggggcgtctagatctcatctaagggagacacaacttttctggtcctcagatggaaagctgggggaaggtaccagtatttacccttccataaaaactttggaggtctttaggaggatacccctcaggagggctaggagaggaatgacaaatacagaggatagaaggtcccgtggcctggttgtgccctcacacagggtatgggttgtccaggactgccactcccgctgccacaccaccatctgcatgctcgatggctttggttcgaagtagatgccccacgtgcttgttcatcacgagtgtcttttcctgcctatagaaatggaggcaggggacacacatcacctggactcagccccaaacccaggaccttccctggacccagctgagcagtacctgggtaactgtctataccaagaaagtgctaggattttagagtctctatgcctctctggagtctccttctagtcctaggttgtcaaaccatgtgttctgagtcctcttggtgctatttggagtttccttcacggttgcaaaggacttctcatcagggcttcatctgataccctggtaaggtgggcaggtcttgggtccttggcctcatttaatagataaagaaacaggtaataaagctagtgattggcagagctggcaccgaagcccaggattcctgactctttccagtgttcccctctaggctggctcacttggctggcactcttgcaagcaggtagtggaaagagcttctcctgattggctcacctgacatagaccccaaagatgcccagctctgaaatgcactggaccactcgggcagggctgccaggccgtagcaggcaattctcaaaaggctcaggttcgatcttctccatgaggatgtaggaggccctctcctcactgtccttcagctgtttcagggcctgtaccatttcctccccatataggttgttacctgcaatgaaactggccagtcaccctggaccctctgcctacctcctccatcccatgccctcacttttggggccacatgggcaagtcagcagcctcagttcctggcacccgctcagtgaagccagggcatatctggcttctcaggagggaagctcactttgacaggagagcccttactcatgcagtgaacacatcttccactacactgttctgccctggttctcctcctacctacagctgttccttctcaagctccattgctggctccttctcttaaatgctggggtcccaggggaattggtcctccacgcttgctctctcccccatgtacattttcccaaggagatctctcctattcctgagtctccatctataccctaaaaattgttaacttccggccgggcatggtggctcacgcctgtaatcccagcactttgggaggccgaggcaggcagatcatgaggtcaagagattgagaccatcctggccaatatgatgaaaccccatctctactaaaaatacaaaaattagctgggtgtggtggcgcacacctgtagtcccagctactcaggaggctgaggcaggagaatcgcttgaacctgggaggcagtggttgcagtgagccaagatcatgccactgcactccagcctggtgacagagcgagaatccgtctcaaaaaaaaaaaaaaaattgttaacttccaaatatttaatgcaggctccctgcttagacatcatatgactggcccccaaacaaactcaacttgtccaagcagaacttattacttctgcctgaacctgcccctcctggaccttcctactcccaatcaggcaaaaggtacccctgagtcatatttaactcctcccttccactaccctctcactatctaggacatgtctctccagttggccccatagtcatagccctagcccaggcctctacgttgctcttctgaacaactgtatcagcctcttccacggtctttctgcttccagtgtctcccctcattccaggacatcttctacaatgcagaaactgtaagttttgcaagttcccaccactgctaaccacttgagtcctggatcaatgtgtcccttcctggcttaaaactccctaatggcttcccactgcccttaagataaaatccaatttctcagtatatattcaaggccctttataatcaggatgcaaaccatttttccagcctaaatccctgtcccctcccagctccccctccagcctcaccagtttctcattaacctccaaacatctcacactttcatggcccggtgccttggcttgaggttgtcccttttgtatggaacactcttcctcctttccacctgggaaattcctacccacctcttaagacaaagattaaaaaaatcctctcctctggagaggcagacatgacccctgacctcaaggagtttcaaactagaaaggaaaacagacatgtattctctccagtctcctaatatgaccctactctacttcccaacaatctacccacaggcacctcaggtaaaacttgtccaaacccttcaatgctggttaatcagattcccctgtgctcccggacttggtcacagggtcttaggggacactgtccaacatgtggcctgtgtcagttccaatagtttcccccatgcccgggactgtgcccagagtaagtgccaatgagcactggccacagcctgctagtccctctcattgaggagccctgcaaagggagatccacctacctccaccctctctctggggctttagcacaaaccggctaggggcagcaagggcctcggcgatggcctggtccccttcttcaccctggcaggaggcagaaagcagttatcaaaagtttaaaggctaaagaggcaagaagcttaggtccagctggttatgcagagcagcatcagaggaagagcaggagggagaacagccacaaattccttcaggcaggatgctactatctggatgacactcccaacaaaccccctgcagcagccgatgcaatgagaacaggcctttctttagcaacagctcagggctctgcagcaggcagcctgatacacttctcaattcttgccacctgccttagtcccttccctctggttgccatcctcatctctacctttgctgagggagcttacaatggattccagcccccatccttccattatgaggctgcccttctgctcagagttctaggggttctccagagcatcaccaaccttgccagctccaccttccccttgtcacaatgccagctccaccctccccaacacattgggctgtaggtctctgccacctaggaggcctgtggtaggagaaacaggctgcccacgtaccacatccagtgagtagaggccagcaaaggtggcgcggaggcgggccacagcctcaggctggccagggagcaacatctccagcatgcccggcctgcttagctcctgctgcaccttcttagtcccagccagctgggtggcaatgtctgggcacttggcagcatgtgacctctccagcagtagacgtgcttcccaattctgcagagggaagaagacaaaaggaattcgactttattttacttcagctgacgtttactgaacatccatccattaggtgccaggtatcatgatttgtatcttcaccctcattatcacccaggatcattctaacatccttgtgagccaggtgtgatatgttgtagttatgtatcattgtgccagactgtgagcccctgcaaaggcaagaatcccccaatctgtgggaaacaatagaaggtgtaagggtagaacatttgtctacgtgctcagcttcccactgtgttccatactccctaccatggccttcaagatccttcaggagctggctcctgtctactttttcaaccttgtaccatccctgactcctagtctctgccattctactcacacaggcctgtcattcctcaaatcacaaagctctttccctcctcagggcctgcactgcttttccctcaacctgaaacccccttcctttcggcttttcccatgcatagctggatccttaccatccttacatctcagctcaatgtcaccttttcagagaaggcttccctgtccactctatttaatgtggatttcccataattctctttttacccagttgtttcattgaaagcagttacctgagactaaaacacacacatgcacacatacacgcacacgcacacaaacatacacacacaaatcccaatttttttttcctatttttgtttactttttttttcttttgagacgtgggtcttgctctgtcacccagactggagtgcaacagcgcaatcttggctcactgcaacttctacctcctgggctcaagtgatcctccctcctcagcctcccaagtagctgggactacaggtgcacgccaccacacccagctaatttttgtattatttgtagagatggggttttgccatgttgcccaggctggtcttgaactcctgagctcatgcaatccacctacctaggcctcccaaagtgctgggattacaggtacgagccacagtaaatggccatatttttgtttactttctgatgcccatttctctgaccagactgtgagctccatagcacagggctcttatcattttcctcattttctgttgtatctccagtgtctaacacagttcctggcactttgtagttgctcaataaatatttgttgttgttgctgaataagttgaaatttgagtggggttctgaaggacaggtagagcctgacaagtgagactcaatagggaagggatactcaggctaagagaataatatgaacacaggtctcaagtggatgatcacaggatgaatggtttattaccacaagagctgagggtataaaaggcaaggaaacagcaggggatcatgcctcccaactctggttcccattctcatgcaatggggagacagtctgtccttggctccagaccactgcaaactgcacacagcaggatcaggtctctcctgtgacccccacccaatgctgtccttcctttgatactactggtccacctgtagcaccttgacctgatcttcatcaataaccccaggaacccaactactagtctggcattccacgcagaatcacacgtgaccagaacatcagaaataaacccagagaaataccccattatggtagaagcaggaaagcaaaaccaaagataagcaaggacttgcccagggtcatctagtaagtcactaagccttctagatctctctccatgtctaaacctgctctgagctgctcagttccctaaaaatgtctacctcttggccaggtgtggtggctaacacctgtaatcccagcactttgggaggccaaggtgggtggatcgtaaggtcaggagttcgagaccagcctggccaacatggtgaaaccctgtctctattaaaaatacaaaaattagctgggtgtggtggtgggtgcctgtaatcccagctactcaggaggccgaggcaggagaatcgcttgaaactggaagtcaaaggttgcagtgagccgagatcgcaccactgtactccagcctggtcaacaagagcaaaactctgtctcaaaaaaaaaaaaaagtctacctctttaaacactactttccttccttgttatctcaaactcttctaagttttctttgtcgtgttttgaaatctagacccatttcttttttttttttttgagacagagtctcgctctgtcagccaggctggagtgcagtggcatgatctcaacttactgcaacctctgcctcccgggctcaagcaattctcctgcctcagcgtcctgagtagctgggattacaggggtatgccaccacgcccggctaatttttgtatttttagtagagacggggtttcaccatgttggccaggctggtcttgaactcctgacctcaggtaatccacctgccttggcctcccaaagtgctgggattataggcgtgaaccaccgtgcccggcctagacctatttttctaatagacagtttatctctcctgtagtcagcaagttgccaccactgctaaccacctatctaaagaaaaggatgttctatcgagataccacctctatagagcctcctcatgtggagctcaaccctcggggggagtcctagatgaattacagacctagaaggagccccctcagttttctagtgtagctccccccgctcatagaaacagacctagaaagggtcaggaacttgcccatcatcacacagaggcagtcaagctcatgacctccagctcactgcccatggtatttctaaacttatttcctcctttatcatctcccagctgagagcagagcttcttagcctctccatgatgtggatgttaggagcagaggagaagaatgggaataccatcggcctgaaagtcagaaaacctgggaacttcctgtagggccttagagaagcctctccatctctctaaacgttagtttctccatctgtataatggggataattatatgcctcaccgagtggttgtgagggttaaatgaaataatggatgtggaaactaatgaaactacatggtaggatagcaaaatgaggtgatataactgtcattaacatgaatgaggagatgataaaactttctgattcagataaaggaaaggtaagagttggcaggaaaaaaaatggtcagcagtatgctggaactggcttatatcaaccagtgagagctgattgttgttaaacatttgccagcacatctctggaaacagtgtaaatggctgaagctctgtggattcctgaggattcaaattctagaagactgtgtagagtgataggtagcaaaaggcttgagggaggataggaggttctagcagcaagctccctgagaaagaagtgaagtgaggactcggaaaacccaggttgttataagcctgaattgggtctctgtggagctcttgtgggtcccaggaggcaaagaatggtctcacagaaaataccaacctgtagactgtactgacgaggcatgtagccatcccggaagtaaaccacagcaatttcctggccatccctggaacacaggatggagaaggctgctgtgttaaattataactgatttgttcagtggttcaatctatttcagggtgcatcaagatgaatttggctttttcaaaattcagcccacagtgggagcctggtcaggggttcactggaaccagtgaaagtagatatccacactaccagggcttccactgaaaacagggaggtgtgccatacagaatactttagaatatgccagatttagagtcattctaagaaggccagaaggaacaagaaggtcactagaatcaaatttggtaaatgcatacaaatgttggctcgaaattaccgagcagcagaatcatactgccatgtgtagtaaaacacactttatatttccactgcttaaagcagctgaaaccagaatgaaaaaatttttaatggcaggggtgaaggtgaaaacgcaaacatgtaaaatgatgagtctgattaagacacaggctttttaaatgtcttttccttttctttgacctatttgatattgtctagtttatctgaaaagtaaattaactactttgtttagttatgataaaagcacattttgaaaaacagtgagtggtattgtgaaattccatggacagttttaattttaacaatcacaaaggtctaggtctaaatatatgtgctgcaatgctacccaaatatgtagcaccaaatctacctggtggtggcccctagagaaaaggataaggcttggcttggaacacaaatccaggctcgagctcagacagtggcatccagaccaatcacagcatgagccagctgctcctcttcctccctgactgcccagctcagcttctcaggcctgacctcaccttactaggagaggcaagaaaacttttgggaacttagggcatatgaaaactaagatgatctctaaggagaccctgatccagaatgtcaacagctctgatagaagcacagcgtggctggctttctccaaaatttcctgggaggatgagatatttcaggaattatgagagaaggaagcaagccatcacatctcccagaagaaagaatcattttggggaagagggtggcaggatgagtttcataaaccagccttccactggattcttgggaatgcttacacaaacagccttcggtcttggtccagagaccccttttcagagatatcttcaaatgttcgtcggatcacatggatgttcctgggaaaaatgggcaagagccagagggaatggatgctatgttctgagtgccccacccctaatcctggagccacacctagaagtcccccttcctttacttacctggccagtagctcattctctatggcacgctggtcaaatatgtttctttccttctcttgagcaatcagtagcaccagagcactggggaaagagcacaggtggcccgaggctactatagaacttgttcttcttttgtttctcccctcaacccccataccgccccacctcctggaataagaataagaacaccgcttccctgaaagaacagatgttccctctctcaggaaccttgagattacctcaggcatagacacctgatgctatcacatatgatttcctgaaaatagaaaacttcaaaaatgaagatgcctctgacccttctccagtgggcagatgaaatattgtaatgatgtcatgggttgatgaatttctgtgcaaattaaaatttagatttaaaaccatctcaaaaacccaagaggactttttcttagaacttaacataattctaaaatctttctggaagaataaacaagtgggagtattgaggaacattttgtaaaagaacaatgcagggggtccggggctaatggctctattactagattgtaaaggatacaataaaggaatgtggttcttacacaagatggaaccctacagaaacccacagggccaactacaaacaacgacattatctcctgggccctcccaagattcctataatgtacacagggccacatttgatctcatagtattaatgagatcactagggcttatgtggcttcttcctctctgattattcatgtatttcttaaagaggcaggggcttgagggctcagggaaaagcttatgccagggaactatctgtttggctgccagctaacatatttccgttgtcaaagataggtccagtcccctaagagattcctagggctaatgctcagcagtaccaaactgcattttttttcttttacattttattttatttatttttttgagacggagtctccccctgttgcccaggctggagtgcagtggcacaatctaggctcactgcaacctccaccccctgggttccagcgattctcctgcttcagcctcccgggtagctgggatttcaggtgtgcaccacccccgccggctaatttttgtagtttgagtagagatggggtttcaccatgttggccaggctgggctcgaactcctgacctcaggtgatctgcccgcctcggcctcccaaagtgttagcattacaggtgtgagccactgcgctcagcctccaaactccatttttgctgtgactgtactgctttgtgtctgtggcttcttcctgagacccatggaaccctaggctttggcttaggattctaagtgtgtattccctgacctcctctgcttagcctctcttgtctatctctgcttctcctgaccttggctgaacctcttagtctaaactctgtttgcctgactcctttctgcttagccaaaatataggtcttagtaagtcccctctcctggtttgcctgaaatctcatgaggtcagatgtgatgttaagctgagtcttggctttgagttgggtgcctgagagacaaactaaaagtggtgctctcacaagtcatcttgccctgagagagtcctaagggccaatggctttgctcttcactttgcagcctaaactgtcccgctcatgggtgagggtgtgtgtgggagggaggcagttggcccaggctggcccacctccaaaaagaggcggaggaggaaggctggcagctggaggttaaagaggaactgcacgccccagctaattaagtcagcctgccaactgctaaacaatcagagctgggctcagaaaacatatttgacctctcctgccttcagttctgagcagttctcagcagtctgtttcctagtaggaaagttgtcagctaaggacgcatgcgggctgggggtgaggacccctgagtcgtaggtagtccaggctctgccagtgacttgtagtgtgtcttggtaattgacttgggtaaggcaatttcgttccttgggccctggttttcccatctataaaataagagtgttatggctgggcatggtagctcacgcctatagtcccagcactttaagaggccgaggcgggcggattgcctgaggtcgggagtttgagaccagcctgaccaacatggagaaaccccgtttctactaaaaatacaaaattagccaggcgtggtggtgggcacctgtaatcccagttacttgggaggctaaggcaggaaaatcccttgaacctggaaggtggaggatgtagtgagccgagatcgtgccattgcactccagcctgggcaacaaaaacgaaactctgtctcaaaaaaaaagaaaaaaattggtgttaaaaagatcacagttcccaaacttttatcaccagtagtccccttttcttattctactcattctaaccacaggccctatgctttgagagtttgtctaaattgaaattgtaagtcattttgcaggcttccatttttaagaaattttaaaaatcatgagataattgacgaaaattaatctgctctaccaatgcagtttttcagtcaatactgtggaaccatatctcttaaaggcagaatagggaagtagagagaacataggctttagaggcagatgaattctatacttaccggttgtgtaactttgggcaagttattcaaactctcttagcctcagtttgctgttgtatgaattaaaactaatacttgtcaaatgatagctattattattattatttgggtttgttttttgttttttttttttttgagatggagtctcgctctgtcgcccaggctggagtgcagtggggtgatcttggccactgcaacttccacctcccgggttcaagtgattctcctgcctcagcatcccaagtagctgggactacaggtgcctgccaccatgcctggctaatttttgtattttttagtagagacaaggtttcaccatgttggccaggctggccttgaactcctgacctctgatgatccacccgcctcggtctcccaaagtgctgggattagaggtgtgagccactgcacccggcctattattattattgaaagtaccacataatgatccacacagatttttaaaaacatttttcagatccatgatctcatttaattctcactaacacccctttaggtattattattactcctattttacaaatgaggaaactgaagctcagagaagaactaacttgccaaggtcatgtgctatgtcagcagaagaacctatctcactctcacaatgggggaagccagttctggctcaggtgccacataactcctacctaccagtgcctaattttggacacacaagtattttctgtccacgttactgacaggctggcaggcaaaaccctctgcagcatttgtctgtcagcagttccccagctgacccatcccctggcttcactctcttaaaatacaacctagccaatatacttgaaagaatatttgtctgatgacttctaaatgcttacagtctgaggtttctttgggcttagtgaggcttagcaaggacagagaggctcccttggaggtaagagcatgattaagagtggaggttttagagggaggtagactttgggatctgccaccaactcatcacttagccttaacaattcacttcgtttctcagaacctcagtttcctcatctgtaaaatgagggagttgaacagtattgacctcagagagcttattatgagaattcaatgagatcctgtatgtacagagcttagcacaaggtgtagcactagtaagtgtacattaaggactattaatgctatattaacattgcaataactgttagtatagcggcccctcgatgatctgaaaatcacttacctaacatcttcacttgagaaataggaagaaagcaaaaaatgcctctaagcagttaaaaaggataccataaaatttcgtagtcaaagcttatgcatttactcatccaagaggccctcacactcttcagacccaatcataacaatctggatcatttgttttcccaaaccacagcaaatcagaagggaggcatgggcatggggggtggaggattccaaattcaagcataccaacagcagtcaaaagtaagagctgagaattgggaaacagacaagaaaactatgaagaaaatgaatgagaggccgggtgcagtggctcatgcctgtaatcccagcactttgggaggccaaggtgggcggatcacgaggtcaggagttcgagaccagcatgaccaacatggtgaaaccccgtctctactaaaaatacaaaaattagccaggtgtggcagcatgcgcctgaaatcccagctactcaggaggctgaggcagaagaattgcttgaacccgggaggtggaggttgaagtaagccaagattgtaccactgcactccagcctgggtgagagagtgagactctgtctcaaaaaaaaaaaaaaaaggaaatgactaagaacttaaagcctagcagtcagagctattagcgcaggcaaacagccttgcgtgcctctctaaccctaggtagcactactgtattacagcaagctgcaattgttgacagtcataatgatgacctccactcaataagaaaaagttaaatcatagtcagcatctgttatttaagaaggaaaccttaaaataattttggcatgtaaaggtataagtttctattcctagaaaaatccccttattctctaatgatggctggcaagaaaagaagttgctaaacccatgaatgctgaaactaaagcaggatcctcctgctaccttttcacacccttacttgggtgagccgtagagctcccaggctttggcaattcccagggccagtcccttgctgggattattagagaggatcttgccagcttctttggtcttactcaggacactgagaacatgtctgttggaagagagatggctgttcagtaattggatggacctggaagacccctctgcccatgacctcatatatacagcaacatgactctgagaatcagctgagcactaaaaagcatcctcccatcacattcctgtaagatccacttcaggttggaatatgctgggctgccctaaccttggcccctggtgtatatgcctggaggagacctgagagcctctgtccccaccccaacctaccctagtgtcccagtgagctggagccccttactctgggcctccaggtgctgtctggaatcctgctgcagaccatctaaaatcattgcaacctggagcatcactgctggctagaaatggatgctaccaggcccagcccccagacagaagtccctgcattcctctctctggggctctcaagatattgttccctctgcctgtacaatggagggacaggactagatgagctatgaggtcctttttctccctgacataccaaggatctcattacaagtggaaactgctgtcggggtggccaggggcaacatgtgacccggggcccaggaaagcacaatcatagctggagttccctggcctagccagtgactgtacacccatcagcatgtcaccccacaggtatgccgggggctgcccaggggacccaccggtgcacagctggggtccgggaggccaggcccccaaagctggcagagatggtgttgatttcgatctgtttcagggctggggagccatctgcgctgcgctggaacatgtagtctgagcgattcaggcccaggaacacagtctgtggggaaaactgaaggctgacagtacctgcccagggactgactctgaggacctagccacagagcacacaggtaccatgaactctacacagagattagaggtaccagcaaacactcccaagcccagtggaatcattcttctggtcatcctagaattggtcactgggataaacccagtgaggaccagtgagaggcagattcccatgagctgagggcctggaccaaattcttcaagcaaaacagaaaacaaacagagatgggagggacaggttacagactggagtagggctgggaatggttacctgggcaatgccctcttttaggacttgcttgtggatgtcaaagagacgagcggtaaagtcatcctgtttgatggtgctggaggaagaaacagagaacattttgcaggcttaattggacctaaaatttcaaggagtcccatcctcagtcattgactcctgaatcctctctgagtctactggccaaaacttgaatgtccgccccaatgtggtagagaacagtggctaagaatccaactctagacctgggttcaaatcctagctctaccactcactagtaggcaacctcagggaatcatttcacctctctgtgtctcagtttgctgatctttaaaatggagaatataattatatttatatcatagagttgtggtaaaaagccaataagatattacattcaaagaattgaacatactgcaccgaagaagagctagaaaatgacatgatgtatctattctacttgaatagctctgatggttggcaagccttctggttgacctaatactaactctccatagcttttcctaccctctgcgacctcccagggtgagccttctcctcctcctccacagcagcccttggagattagaagacagcagttatgccctgtgcaccaataagatttttctgacccaagctaaatatcctgggttttttttgtttgtttgtttcttcttcaactagtcctcatatgatgtgatttcctcagggaagccttccctatctgagtcagatccccctactatgtgttctcatagaactaagaaccactcctttacagcactgactgcagttgcaattttacattttctttgtgtgatgattagtgtcatctctcctgtttgactataaacctcatgaaggtaatggctgtgtctatgcaggctcatcgtcacagctcagtgtactgccatgacatgtgacatgtgttaggggcctatccagtatggttttctgaagtctcaacaagagccacagtaagaaggaatccacaggtgattaacatcacacttactgccctttgagattcagggtggattctgcacacctgctcaagcctgaatcaccttgttacagaaacgtcacagcagaccagtggggggaagccaagtagcccaggcctgccctgaagttcctctgctcctcagccagctctctcccaagggtgagctctctcatgccagcccttggttaggaggagagtcccagctgggcttcagcctccaaggaagttgagacacactttcctttttctgaagaggtgctccccttcatgttttgtagggggctcttctcccttaggaactagggtttatatgtgtatgagaggagagaggaacagagaaggcaggggttgcaaagatgagctgcaagtctccttcataattgcatcattagggttataagccaggctgctcatgtttcccacaatccaggattgcaggtacaaagctgggcccattccaagaaacagctcaggggcaaggtggtgggcagattcatacattcatgactcattgggtttttggctacaagtcaatggtttccaagcttcttaccattatgaccccttctcatattcacccacacatttttaaaagattttgtctccaacaaaagtctaatttctgttgaaaaattaatcaaagacatgcaattacaggttggatatcccttatccgaaatgcttgggaccagaagtctttcggattttggaagatttgcatatacgtaatgagacatcttggggatgggactcaagtctaaacacaaaattcatttgtttcatatacaccttatactcatagcctgaagattattttatacaatattttaattaattttgtgcatgaaacaaacttttgactgtgttttgactgcacctgtcacatgacatcaggcgtggcgttttccactggtagagtcatgtggtgttcaacaagttttgaattttggagcatttcagcttttggatttttggattagggatgctcaacctgtacagtatatacacatctagcatgtatatgtaaatacataatatttctagatatttaattctacaatgaatatatatacatatatatatgtattattatttctttttttttgagatggagtctcgctctgtcgcccaggctggagtacagtgtcgtgatcttggcttactgcagcctctgcctcctgggttcaagcgattctcctgcctcagcctcccaagtagctgggattataggcacccgccaccacacccagctaatttttttatatttttagtagagacggggtttcaccatgttggccaggctggtctcaaactcctgaccttaagtgatccacccacctcggcctcccaaagtgctgggattacaggcctgagccaccgcgcccagcctatatatatttaattctaaaataaataaagaaattttaagaaattgccccagaatctgaagaaaaaaaaaaaaagatcaagggaaagagacagagaagggcggatgggctgaaccatttcagaggttgcttcctcatgccctgagtgtggcccagtctgtaccccatcccatccaaagatgagaggcctgaggtgacaagaaagtgtcgctgcttaggagaagtagaaaatctgactttaacccaataaccttccctacctctgttttcctccaaaaccaggctgacttcccctaattccaaatggaaatatcagtcttcaaagtagggtgtcacggattacagaatgtcaacaataaagggatcttggatttaagccagtctcttcatttttcagatgaagaaaccttaggcccagagaaggaaagggagtggcttgaggccatataaataactggtcgagccaggattagaagccagctttcctgactcctatgactttttgttctttggaggtacctttcctctatcccaccaagtcagctgacacagtaacacctcacggctctgcaatcttccagttccttggctctggcagctcctggccccccaatgcttcactgtcccctacctggaaagagtttgctccaggaaggcagcgttctggctgacagcatccactagcaggttgaagtccatctgcacagcataggcttgctccagcagggcactggggaccagtgaggggaagagcgtgaatggggcatagctcaccacctgtgatcaagaagagagaatgggacaggggtagggcacctgtgaacgggttgtcttcctgcaaatggaatcccatggaaagtctggcctatatttactgaggacacaccaactgtagattagtggttaccttgggagagtggaagggggagagtggaacccagagagcttccagattctgtgatagtttatctctacgtattgaagagagagaagcaaaaaagcaaaatgcaaataacaaaaagaaacccacaagttattgagcacttactatgtgcaaggtactattttaaatactttacatagattcatcattcagccctgtgaggaagatactattattatccacacttaacagagacgggacctgagaaagagaggttaacagatccaaaattatattcagctaggaactggtgctgggatttgaaccagaacagttaacagatccaaaattatattcagctagtaacggggtgctgggatttgaaccaggatggttactaaacacaacacacacatacatacatggaagcctgctccttgctggttgatgttcaagcccaggcccttccatgcatcaggagctcacactccagtttccttgccttttgattttgatttggttactgggtaggacaagtgaactctggttcccttagtagaagccaggagtgttttttccaccaatgttagtgatggtgactcaggttaacaggcctagagttcagctgcattccgcattctttggactttatcatagacgagaaacccaaataccatcaaggacactgattctagaagggaaaagtgcattctgagatccctgccaacaactgaactagaacttgggtaagagatgaaaagaaaatcttgtgacttgtattataaagcattcctgagtttaacctttgagttaatatcagtttgtcattatggtggtataagtttacggtgttagaacttggtatttagatatttatttttaaagtactatttttttttttgaggtagagtctcactctgttgcccaggctggagtgcagtggtacaatctcggctcactgcaacctccatctcctgggttcaagcaattctcctgcctcagcctcccaagtagctgagactacaggtgtgtgccaccacacccaggtaatttttgtatttttagtagagatggggtttcactgtgttgtccaggctggtctcaaacacctggcctcaagtgatctgcctgcctcagcctcccaaagtgttgggattacaggcatgagccaccatgcccagccaaaatattattatttttttaacaggtaatacaaatacatgatacaaaattcaaaagagacataagaatatatagtgagaagtatgtctcactctcattccagtctcctggggaaaagactgggccccagccacccagttctcctccccagaggcaaatgacagactagtgtctcacacatccttccagtcatctttgtattgatatatatgtatacacatatattttctctttttttcacccccatagcaaactatactacattgtgctttttaaatatttccttatatgttcaaatagagcattttcattatttttaattgctgtatattattctactcttaggatataccataatttattgaatctagtatataggtggtttctttattttcctattaccattaatgtttcaatgggtatcctagaatatacattctagatattttcatatatgagaaagtccatacattctaaatttctaaaagtaaaaatatcaagtaattcaggtaaatctattttaaattttggtagataatttctaaattacccttctcagcatcttttttttttttttttggagtggggtcttactatgttgcccagactggaatacagtggctattcataggtgccatcatagtgcactatagcctcaaattcctgggctcaagcaatcctcctgtctcagcctccccagtagctgagactgcaggtgtgtaccactgccctggcctcagcatctaagataaaactgaggaaggctatttgtgagaataaggtttattcagtctgaagcctttatgagttagaatgggaatgactgcagattacataaggggtgacctaataccctgagtagctatgtgatgactacaggagcatttccttggcttgaacacatagagctctgctgcccccaacaagtctcatcttggcctcaaaaactcagagtttttctgctaagacatccctctgcctctgtcccagggctcattatgccctcctgaatttaggatcaatagtttatagctgttctctgctatctacaggctaaaggctgaaacacacagtcttctcacttttgatagagacattaacataaaatgacattactggccgggcacggtggctcatgcctgtaatcccagcactttgggaggccgaggcgggcagatcacaagatcaagagatcgagaccatcctggccaacatggtgaaaccccatctctactaaaaatacaaaaattagctgggcgtggtggcacacacccgtagtcccagctgctctggaggctgaggcaggagaatcgcttgaacccaggaggcagaggttgcagtgagctgagatcgtgccactgcactccagcctggcgacagagtgagactctgtctcaaaaaaaaaaaaagaaacatttttctactatttaaaaaaacctatagcacgtgcatgacaaaattctgctttgtagccaggaagcaacagggagtgataggaattgtggcaaaaagaagtacttgcatcttctctaaagggggcagccagaactctgctctagccaattgttgccatgcaggaaagtaggccagagttgccagatgatataatttttcaagacaagttgggttgctagattttttgttttaatttcatgatttttttttttaaatgttggctctgactttttaaaaatactctggtgaaaacaactgttaacaatgcttgcccctggtcagggaaacagtggctggaggaaggggacttactctgtactgaatacccttttgaattttgcgccctgttcaaatgtatttgaacgtattacttattgtaaaaaacaaattaactccccaaacactgcaggagccaaatactcagcctagatatggctagtttgcagctctgatctacaggataaagttcatactcctcctccacccagtagctaaggccccgcggctgtctgacgctggcctgccttctttcccactatatccacttatgcgccctgcatttcagctgcattctcttgaacatttttttttttttttgccttttcctacttttgggtccttgctatgctgttccttttccctatttgtcttttaaggtctagttcaaataccaccccccatctcaatcatctaatcataatgaactactctttcttccagctgtcctatatagtatcttgggagaggaaaaaaagcatggatgttcagagcatggactcaggagccaaattccttgggttcacatcctggctctgccaattattttaccatttaaataacctcaggtaggttacttagcctctctgggcttcggtttccttatctctgttgtggtgaggagtcagtgattccaaagtgtttagaataatgcctggcacatactaaatactcaataaatgatagttaactttgtgtagcagactgcctgtgtttcctcatagagctgatgttatttaattttgttttgtggtatgttctctaactagaccaggagccccagaggctagggctctggctgactcacctctctgtcctcagtgcctacaatggcccggcatagagcaggcatttggtaaagatttggagtaaaatcattctctctctctctctctcacacacacacacacacacacatacacacacacgtacactttctgactttttttctggattagaaatctcattgtggattacgccttttctaggctccataacctcccagaaagaccaagtgttggatcttcacatggtacctattgattaacagaagaaacaaaagcgtggaagagaaaatgcttcattttagattcatacaagtaattcacaaaatctaggttcacagcccaagcaattctattccataccatcagcctgccttaggtgacagacattgtcatttacttgggccttagcaaacaattactgagtgtggactccatcaggcctgtgtaggttctgggcacacagagacaaaaaagaatgggtctggctaaaaaaagaagagatgttggcagctctttagtcaccaatatggtcttaaggtgtactgttaagttaaagaaaaaaaagtgggcaaaaggaggctgggcacggtggttcacacctgtaatcccagcaattttggggggcagaggccagtggatcacttgaagtcaggagtttgagaccagcctggacaacatggtgaaaccctgtccctaccaaaaaaaaaaaaaaaattagccaggcgtagtggcacatgcctgtagtcccagctacttgggaggctgaggtgggagaattgcttgaacccaggaggcggaggttgcagtgagccaagattgtgccactacactccagcctgggcaacagagcgaggccccaaggaatatatttacttgttattagttacttgttatgaataagccatctgaaaggatcaacaagaaaccaaaacacaagctgcattagggtaaactcttgtaccatttgaatttgaaccatgaaaatgtcttacctagtcaccaaattaaaaaagattttatttttttatttttttttcttccctaaggatgaggttttaaaaaggtgtggtttggactcagcagttctacttttacgtattgaacctggagaaacactcacataggtgccccaacagacatatgcatggatgttccctataatgctatttatggtcataaaataatgagaaatcacctaaatagacatgagtagagggaagctaaactgtgatacacccacatctggaatactatgcctcagaatgaagatgaccctaatagaaggcattagaaagttctaagacagacaaataaaaaaccaaaaacatatcatagaataatatatatgatacaatttgttttttaaaaaagacgtatttctatatatacctatctatgtatataaatgcacagagaaaggcttgaaagcatatatcacaaaccagttacagagaaggtagagtgattatggggttttcagtaatagctcactgggcaaagtgcttcacatgaatcatcctgtaattctcttaccaaaccagtgaggtaggtcctattattatcccatttttacacctgaagaaactgcagctgagagcggttaagtaatttgcctaagtcacacttcaaaccccatatttaaatttgattactccaggacactgcctttttattttctacttctagagatcaattttagttactggaaaaaataaggcaaaagagatatggtccctgatgcaaaggagtgaccctcagcctggccggggccagacagtgggccatggtgaatgctgtggggaggagctaggggcttacctccgaggaagtgggctcctgtgaggtcctcagcaatactccctcagccagggcccggtccacggcctgccgtgccagctcctctagctgctgtttatcctgcaagaggctcccccagttggtggccatcccaacacctgcaaaagatggagagaagagagttggtaacagatggcctgaagcccagcaaccaccgaaactggctggcggccacccccaacacagcaggaccctgacctctgttggaagggaacagcgtggtatacaggagtgaacactggctggttctagctcttaacaacttccatgtgcacaaaatagaaagcttgacaaagcatttccattgccactctctcttttgattcccaacacaatggcattattctcacagtaaggaagcagaggcttggagaggtgaaatgacttgcccgaggtgatgactggtatagcctggacttgaacccatgtctctggactcccagcctaaaggctcttcattggagaaagaagcactaatatcagatgtgactggggcaagttccttcccttcccagagctacagattccctaactgtgaaacaagaagaatcggatagatcagtttccaaacctggctgaacattctggggagctgggaaagaatacagattcctgggccccatcccagagactctgatgcaagaggcctgatgggaaggaggggttgaggctttgtatttttttttttttgatatggagtctcactcagtcgcctaggctggagttcagtggctcgatcttggctcactgcaacctccgcctcctgggttcaagtaattctcccgcctcagcctccctgagtagctgggattacaggcacacaccaccacgcctggctaattttttgtattttagtagagacggggtttcaccgtgttagccaggatgatcttgatcttctgaccttgtgatccacacgcctcgacctcccaaagtactgggattacaggcgtgagccatcacacccagccgaggctttgtatttttaacaagttttcctgggataggagtcactgcagtacattattaattcccttcaagctccaacaactcatgtcagcagatctcaaataaattacatgggaagggggagggagctctttgtggaataccatgaaatgcgaataaggtgaactcctcccttatacaaaccagaaggaatcttagtagcaggaaatgactacattccatatatggacatttatcatcaaagcaccaaaagacagaaaatatttttgagaaatcacattagcaagatggaaattgctgaaacccaagtgtccaatgtaataggagaagttgtctgattggttgcccagagacatacagaggtgtacaaactcacaccctgatactcattcatttttcagcaggcctcaggagtttaagatctgggtaaaaatctggaaacacagtcactaattttgttctgccctgttgccatttaacagaacatggttgcccaactcagtggtccccaggaagggagttagagaataataggaaacctccatcacattcagctctgtccccctgtccccatgacagagccagtgccaggccaattatgaaagtctgccagcctcagcacaatgctttgaaagaatgcgcatgtgatctcaagagggtcctgataatatccctgttgagtgagacatacatgagggcaatcatagtaaagaacaaggttcaagtcagacagacagacagacctgggtttgagtccataataatacgacttctccctttcccttctttccttccttccttttccctttccctttcccttccctccttctttccttccttccttccttctttttctttctttctctctctctccctccctctttctttctttttttttttttttgacggagtctggctctgtcgcccaggctggagtgcagccgcacgatctcggctcactgcaagctccgcctcctgggttcatgccattctcctgcctcagcctcccgagtagctgggactacaggcacctgccaccatgcccggctaattttttgtatttttagtagagacggggtttcaccgtgttagccaggatggtctcgatctcgtgatcccccactctcggcctcccaaagtgctgggattacaggcgtgagccaccccgcccagccgacttccctttcaagtaagattgctgtgtggattaaaagagaaaaatcagtgtgaaatttatcagcagtgtttgaagctctatacatgagaccattttttggctgtactctctttataggtaggaggagacttgtcagaggtcacacagaagcctagtggcagagccaggacaagaacccattaccttgacattagagtaatgaaaccctccatgagcccccatcgttccacaactctgaaattccaacatctgtttgctgttgggcttttatttagttggcaaacactgatttgcatttaatgccactcccttgactaggtactggggatatggaggaggataagacataaagataatcaccatgggccaggtgtggtggctcactcgtgtaatcccagcactttgtgaggccgaggcaggcggatcacccgaggtcgggagttcgagaccagcctcaccaacatggagaaaccccatctctactaaaaatacaaaattagccgggcctggtggcgcatgcctgtaatccgagctacttgggaggctgaggcaggagaatagcttgaacccaggaggtggaggttgtagtgagccgagatcgtgccattgcactccagcctgggcaacaagagcaaagctctgtcaaaaaaaaaaaaaaagaaaaaaagaaagaaagaaaagaaatcagatgaaggtgctaagtgggccctttgtttttctcattctacagcctcaaccctcccttggctttatttatgttttgctgatgacattcaaatctacatcttcacagcaatactttcctaccttcaaactagaatatccaattttttcctgcgagtctccatacaaccagaatagaatttgttgttgtctcccacaaatctgcttcttctctgatgaaccccacccaggtacccaagccttgagtacttgtttcctacatctcactctccccaaatcctatggattttgctgcctaagtatatagtactttgaattcctttatttatctccatttccagagtttgtagcctagccccggccactgtcatctcttccctgggcgtgaaacagattcagagtcaggtgtcttcagtgaccaggatatgttggcctctgtcccccttccaggacttggcacgtgctgtcttctctttggaactctcgccaccactcctgatctgggctcgcgatttcgttccggaagctgtccctgttctccgccccgggcttctacattctacagcccatcacttttccctgtaccgtaggaacagtgtttgtcttgatcacttctctacctagtaattagccgcgcttagtactgtattcattcatcacatgaatgaatgaagaatgaatgacagacgggtcagatcaccgaaagcctcaaaacgcccacaaggaaatcggtcgcactttatcgccaggacttaggccagtgcctggaaaggccccgaggcaacgacacggtcggctgcccaggctggccccacttcacgggcccgctcgcttccaccctggacaaagtttggccctaatcgctccccgttgtagctctaactggctccagtctcactggcctacatgccccgacaccggcccgatctaaaggcagaagatccggaaagtctgggatcagtgcgcgccagcccaaccccctcactagacactagttgccccgctcctacgaagggtttcagccacaaggtctcccggcctccggaattccaatctcttgccagacccctccctcacatcgttcctcccgaggaaacgtgacccatgccggccgccgtggccgccccaacctactagttcgcctttcctccgcgaacggttctcccggccctcgcgccgctacccaggctcagggggcggggcctcgatgcgacccagtgcgcttgcgctgaccgccccggctaggcttaaagagcaggcggggcagagacccatacctttggcgctgagtcgaggccaggaaggggcggtcgatgagagggcggccttagcattaggagtgcgtcggctgcaccctggcggatggaccttgggaaggaggggaggggaccatcggggtcggcggggagctacgggtatgcatagctcatagagcgtcagagctgacgacgactagtggaagatggggaaactaatgctcagagcgggacagtcactacctcaggggcacacaattgataagggtgggggtggccgtggtaatggaggccccaaggaggggcaggggcccatagtacgtcaggggctgagcctgtattagaacccaggcttgtttcccagcccagccaagtcccagaaaaatccccctgattttatctatttttttttaacctgggataccagcagggaaagcattagaggcaaaaggaaaggattttcatttttccaggaatgctgaagtcaggactgtttgaggggagccctgtgtttctcagactctcttgtaccgtttacatcaggatctggggcagtttttaaaaatatgcggattcatgattcctaccccccacctcattgcttggcagcccccaggtgccttccctgtttcttccttctgggttgtgataggcttgtctgcagtccgaagcacctgatacgaattttagttaaatggaatgtatcagtccagcttctagggaattaaccataaataagacacagccactgctttcagtctgataagataggcaataaactgcctttctgaaggaatcagggatggtttttggggtcttgaaggatggataggaaggtataggtagtgaaggaggtaggggtagaggtgagaggctgggatggggacagtgttccaaattgcaggaacaaaagcagcaaaggctggctgggtgcagtggctcagacctgtaatcccagcactttgagaggccgaggcaggtggattacttgagctcaggagttggagaccaggctgggcaacatggcgaaaccccgtctctactagaaatacaagaattagccgggtgtgttggcccgtgcctgtaatcccagctactcgggaggctgcggcgtgagaattcttgagccccggagacggaggctgctgtgagctgagatcacgctgcagcactcctgcctgggtgacagcgtgagaccctgtcctaaaaacaaaacaaacgagcagcgaaggcatataattctgagggttgctcggcttgttttacagacactgaggagtttggtgtggataatgaggaagggcctgagggttgcaacaggacttaggcgcttaggcttggagaggtagcctcagacgccagttccactgagcaacaggagctaagggctttaagcaggggaaggacatggttagttttgtgtgttaggcactggttacagcgtgacaaatggtttggaagtggggagatgggccagagaaagcagagagagttaagatgtgagatcatgaggctgtagccagtgcagcagctgtggagatggagcgaagcgaacagatcaaagaaatttaggagtgagaactcctagtgatcgtaaatcagtggcccaacccagggaccaagatccttttgactctttttttttttttttttttttgagacggagttttcgttgttgttgcccaggctggagtgcagtggcacgatctcagctcactgcaacctccacttcccaggttcaagcaattctcctgcctcagcctcccaagtagctgggattacaggcgtccaccaccacacccggctaatttttgtatttttggtagagacagggtttcaccatgttggccagattggtctgaaactcttgagctcaggtgatccacccgccccagcctcccagagtgctaggattacaggcgttagccactgcgcccggccccttttgactctttaaataaaccatgtacattatctgactacaggacaggctgagtcctccagtctcccgtgtgtggtcacgggatggggggagatggtggcagataggtgtctggttattcccagaacaatgtttcctgatgtcctttcctcgttggcttttgtacctgaggggataagcagctgttaactagaataggccccaggtggcaggaagaggctcctgggtcaaccaggaacaaaagaagctatttctagtgcagcatgaaattaaaaatcaaaagcatgacccagggttctctgtgcaggttcccctcttccaagacgggtgccaagtgatgagtatcaggtgtctatggtgagatttggggaggatcccagaccttaacagccctttggttgaaacctctcacaatgtggcaggtaagatgtctttattcccattttgtagatgtggcagctgagcctcagaagttacgtgacttgttcaaggtgacccagtttgtggtaggactgggagtgaaggactcttgactaagaatctttccagggagcgtttgccctttctgcactctctgcctgggtgctttcctccaaaatcctggcatgactggctcctttggtcattcagatgtttcatccctggaggctgccccaccctataagtctatcacgttatccttttcttttttttgagatggagtctcactctgttgcccaggctggagtgcagtggtgcgatcttggctcactgcaacctctgtctcctgggttcaaacaattctcctgcctcagtctcctgagtagctgggattacaggcacgtgccaccatgcccggctaatttttgtatttttaggagagacagggtttcaccatgttgatcaggctggtctcaaactcctgaccttgtgatccgtccgcctctgcctctcaaagtgctgggattacaggcgtgagccaccgtgcccggccttgtattttcttcatagcagttattcatatctgaaattgttgcttttatttgtttgctgtttccctctgctagaatgtgagccccatgaaaatgggccatgtctgtcttgttcaccactttacccccaggacctgactggtgcctgccacgtggcagatgctcaataatatttgctaactgatggaaatagtttggggagagagaaagagaaggaaaccaacatttaatgaaagctgaggatgtttcaagtacttctcacaaattacctcatttaatcccttcacagcctttcaaggtagaaatcgtatctccattgggtgaataagaaaccatgctaagtcaggtcaagtctgtggtttgttacttttgaggctatagactcgtctgagatccattagtataaaattttgcatcagctacgtggaggaattcacagaccttctcaggctcacttggggatctcagatcaagacacataggattggggaacttgcccagggtctttttggccccaggcctttgctggatcctcactccctggcaaggatggagtccatgtagtggactgtagggaacctgctgaagattccggagcagagggagatgatttgccctgagcctctggtgtctcagacctgagtttgaatcctgactgtgcagaagtcatctcacctctccgaatcccactttcctcattttattttttttctttctttcttttttttttttttgagatggagtctctctctgtcacccaggctggagtgcagtggcacgatcttggctcactgcaacctctgcctcccgggttcaggcaattctcctgcctcagtctcccgagtagctgggattacaggcacatgccaccatgcccagctaattttttgtatttttagtggagacagggtttcaccttgctgtccaggctggtctcgaactcctgacctcgtgatctgcctgcctcagcctcccaaagtgctgggattacaggtgtgagccaccgcgcctggctttcctcactttcaaagtgaaatctgttttttcctaacaataactaccctttattgatctggtcgctaagtgtcaggtacttggctaatgactttacagtcgttatctcactttcccttacctccctatcacatcagtatctttatagcctccattttacagccggggaaaggaaggcttgaagaggtatcctgacttgccaaagatcacagcagcagtgtcagccatggtgttcccacatatgtaccttgggacatgccatgggctcagacttcccaaagctaactgttgaatcaatttcatcctctgttcttggggtttgtgggaacatttgggtctgaattaggtgaaaaaaggtatgcagggatgtacttcactgtgaatggaggccaatcccttaattttgtgtcttgcctttctccctgcgagggcctctctccaagtctggactgtgggttttttttgtttttgtttttttgagatggagtcttgctttgtagcccaggctagagtgcagtggcgccatcttggctcactgcaagctccgcctcccgtgttcatgccattctcctacctcagcctcccgagtagctgggactacaggcgcctgccaccacgcccgcctaattttttctatttttagtagagatggggtttcaccgtgttagccaggatggtctcgatctcctgaccttgtgatccacccgcctcagcctcccaaagtgctgggattacaggcgggagccaccgcacccagccactggactgtgccttttgattggaacatctctgtcagccccagggtctgcatcacacatggtctgcatctgtgcacatggctactgtctctttttagcagtgatatcaccctgcctcatactgttgtttatgaggccatctccccacctggctgggggccactgctttggccattcagagtggaattcctctgtcttccagcccctagcacaggcctgggccagcattgctgctcaggaaatgcctgtggaatcaaagtgaggactgtcccaggtgttgaggatttactgtatgctaggcctgtccctgacactttatatgtgttatctcatttacacccccacagtcatcctgggagggagaagttactctgcctattttaccgagaagaaacagactaattgaagttgggctttgccttaggccctcttgtggtggttgatggcacgagggccaactctagggtctgtgccctggtcgtgtttgaggtgtgtgggctgaaaaagggaagacacacttcaaggctccagggatcctcagagaccttctactaacaggttcccagtccggctctcatttcatccgtgaggacacagaaggttagaaaggggagataacttacttatagaccctcttctccacttgttatatacttatgtatccacttactttttggcaggatggatctgttttgactcaacattgtaccacccatgtagcccagtgcctaatccaggttgatgcccagtaaatacttttacattttatttattatgaaaccactgagaaaggtataaaaattaacagaacaaatacctgtgtacctaccatccagcttgcaaaataaaacactgctaatataaagacctttttgtttccctccatgactgaccccccaacccaagaagtaaagactctcctgatttggtgtttattattcctatgcaatgtttattgagatataattcatgcaccataaaactccccctttaaagtgtgcaattcagtggttcttggtatatttacaagattgtacaaccattaccactgtctcattccagaatattttcatcaccacagaaagaaacctcatccctattagtagatactccacaattctccttctccccagcccctggcaaccagtaatttactttctttgtctatggatttgccttttctgaatatttcctgtaggtggaatcctacaatctgtggccttttgtaactagcatctttcacttagcataatgtttgcaaggttcatccatgttgtagcatggatcagaactttattccttcatatggctgaatagtctttcattgtacagatatatcacactctgttcctccactcatcagttgataggcatctgggttgtttccactttttgccattaagaataatgctgctatggccaggagtggtggctcatgcctgtaatcccaacactttgcgaggttgaggtgggaggatcacttgagctgaggaattcaaggccagcctgggcaacataaggctctctacaaaaaaatttaaaaattagccgggcgtggtggcatgcgcctgtcatccccactactagggaggctgaagtgggaggatcacttgagcccagtaggtcaaggctgcagggacctatggtcacgccactgcactccagcatgggtgacagagcgagaccctgtctcaaaaataattataataatgctgctatgaacattcatgtacaggtttttgtgtgaatgttttctgttctcgtgggtagatacctaggagtggaattgccgggtaatatggtaagtatatgtttaactttttgaggaactgctgttttccaaagtggcagcaattgtatcagagctccaatttttacatcctcaccaatacagttatccctctgtatctgtggggaattggttccaggacctcccatggataccaacatccaaggatacttaagtcccttatataaaatgatgcagtgtttcatatatgcttaagtcccttatataaaatggtgtagtgtttcatataaactatatgcatcctctcatatgctctttaattttgttttattttattttaaatttaaatttatttttatttattttgagacaaggtctcactctgtcaggctggagagcagtggtgcgatcatagctcactgcagccttgaactcctcggttcaagggatcctcctgtctcagcttcccaagtagctgagactacaagcgagagccaccacactgtcctttccatgtactttaagtcatctcggccgggtgcagtggctcacgcctgtcatcccagaacctcaggagaccaaggctggcagatcacctgaggtcaggagttcgagaccagcctggccaacatggcgaaaacccatctctactaaaaatacaaaaattagctgggcgtggtggcgcacacctgtagtcccagctattcagggaggctgaggcagagaatcgcttgaaccccagaggcagaggttacagtgagctgagatcgcgacactgcactccagcctgggtgacagagcgagactccgtctcaaaaaaagaagtcataaatgctatataaattgttatactgtattgtttagggaataatgacaaggaaaaaagtctgtacatgctcagtacagttgaaacattgttttcaaatattttcaagctgcagttggttgaatacacagatgtggaacccatggatatggaggtcccactgtacttgtctgattgtggccatcctggttggtcattgtggttttgatttgcattttcctaatgacaaataatgcgcatatcttttcatgtgcttattggtagtttgtatatcttctttggagaagggtctatttaaatgttttccttatttgtaagttatttgtccttttattattgggttgtaggaattctttatatattcaggatagtagatccttccttatatgtgatttgccaataatttgtcccattctgtggatggtcttttctgtttttcgatagtatcttttgaagcacatattttaaaattttgacgaagtccaatttatttattttttcctttgcttgtgctttgaatgtcatatctacgaaaccattgcctaattcgaaggtcacaaagatttacacttactttttctaagagttttatagttttggctcttaaatttaagtctttgattcattttgagttaatttttatataggatgtgaggtaggtcttatgcatttttaccctcctattaggtgtatttctaagcaatatatgacactttttcatggtatttgcacttttaagtggtaaattatatgattcttgtgcagcttgcttttctctttcagtgttatatcaggagatttatccatgttttaaggggaaatagttcattcattttcactgctctataggtttcattgcataaaaataccaaagtggcagcaattgtatgagagttttgtttattctcctgtgaatggtcacttgggttctctagtattttattactatatatggtaaaaagactaatagatgcctcctgtgcagtgtgttgaaggtcgtgagcatattcagacttacaaggtaatacaaagtttctttcccaaatggttttgcaaatgtgcactcctgccagcagtgtattagaattgccctcattctgcatcctcaccgagacagaatggtcaaggtttctagcttttgtcagtctagtgatgtgaaacggtgtctcgttgtgattttccagattaatagcaagatttgtttttcagtaagtgtttacatggttggatggatgaatgcatgaaagcagaaggggcccagaataaccctttactctgcctgttgttggaggatggcagggctctgggcctagactatgtggctctctgtagggacaccgtggagctagagaatgttgggggcaggctgacaactctagatgtgggagaggacggttgtcaccttgaaactagtgatgggagcttctctctacccagggagaggctatcgtcctgctcttccatctccttgaattttccaagaagggagggagtggagaaagagtgaagccaaaagagaattcctgggactgggcgcggtggctcacgcctgtaatcccagtactttgggaggccaagacaggaggatcacttgagaccaggagatagagaccagcctgggcaacatagtgagatcccacctctacaaaaaatttttgtaaaattaaaaaacaagggaattgcctaaggatgagaggtcacagtggcctaagtgacccttaggaatgaccctttttctgggactttttcatgatctttatattggtgtgacatgaactttccttgtttaatctactgagtttggagatggtcttaatgataataagaaaatgaatagtaatgattatatgttgaactcttatgtgccaggcacttacgccttttctttttaaaaataggtattatctcattcaattcctatgggacaggtactattagtattcccattttattttatttttaaaatagggatgagtctcactgtgttgtctaggctagtctcaaactcctggcctcaagtgaccctcttgccttggcctcccaaagtactgggattacaggcatgagccaccgcacctggctcattcctgttttatagatgaggaatcagaagatcaaagagacagagcaactctgagggtttgcacataggcagttggactccagaactcttaggcatcatgctgtgtggttaacctggctcagccgaatccactagagcaaagaaaagagaggcttgcccaggcttgggtgagaaacaggagtcagaatattcactgggcctggcctgagggcgcagcagggagcagagcgagaggccgctgggaaagatggttctcaaaagcagaagcctcacgccaggggacatggcccatcagcaagcacatgggtgcctcttctgggcatgctggctgctggggacccagaatgggatctgtctgctcctgggtctcaagaaagacctgtcttgtggggtagacagatgataataagcagacttacccataagtgtaatacactcagaaatggggacatgtgatacagagggtgaagagagaacctttatagaaaggacctagtttagttaatgtagtcaaaggaagcccctttgaggaggtgacatttgagtggaggctcgagaagaaggaagcagccatgccccagtttggggaaagagtaaatggcagat

SEQ ID NO: 410 - DNA, 145982 bp, Homo sapiens
aaggagatgggagacctcctacttcaccctgccttcagtgacagcgcttctcattttctttgccttctgctttctgatccacgaagtagaagtgagaaaaaaaaaacttcacaaattaatatactattggattatgctgccacttaaatggctaattgtaatacactgtgagataggctaaattaggaatatgaagtgccagtgggaaaacagatgaggcaacctgtcagcctccccagggagaggaccagtggtggaagctttccagggttaggcttggaccctgaaggaggaatcagggtgtgccatgcaaatatttaagaaggaaggccatctccacggaagagactgacaaggccgatgcctttgcctttgcctgcaaagctgcaacactgcctctcttcttgggctaggaaacacccagcttctccttcactggttttggaaggcaggcaaaaagcaaaacaaaaacaagaaagaaccaccagagcacacacctttctaggtcaaatctcatttcctaataccaacaacaagtttgacaccttttcattaccagccttggacttaaactccaccctctctccagagtgggagtggacccagatgagcaacccaatcgcttattctagggtctgggcagtatcccctactcagttccatgtttgatttggttacggagggatcgtcattgagccagtagcatcaggacctctgttccacagccgctctttctacaagagtctatgcactcctcccctagaaggacaccatctgccagcaggaggaaacctcttttcctgccactgtctgccctggtcctccttccctatctctgaggcatctgcaatctttcatgcctggctctctagcctagatagttctagaacactggaatatattaaaacattcatacacacacacaacttctttcaacagcataagaacctaatgttgaattttcttgaggtttttttttttttttagctctcctgataattgctcatgtgtggacatattaagatcatcattccgcactagtgatcactatccgaaagtcagggaaaaaatcagactgtcaaaatcaaaacaatttcaagtaatgaaggttttgggtataaaatatgtgtttaagggattttgtttaaaaatacactttggctgtcactttaaaaagattcgaccagggaagaaaaaccactatgcatgatatggaagtagaaatttattataggaattggaacttgcacaattgtgggaagagcagggaaggtaaaattctgaaaagtggagttaaaacggtagagaaaagccacagacgactcagaacttacagtgattcctgggagccagcacgtcctgctgccggagtgggacctcaaagcctatggaaggttgttggttcttcaggtctacggcctctgtgaattctcagcaaagcatctggtagaaggcctggtagaagacctgggacaaggtcaccatcaggagggaggggggtgcgaggacaaacaggaacctgctaacacctctgtgtctgtttctatcaccaacaggtgctgataaccttcagaacatggcagctgctttccttctgcctcccagaactcacaacttccctttggaccaactccaatctgaaattatgtagaaagggagagtctgaaaaacatagtcccaaacataaccaagtagacaatagaacaatctggcacattgattggtattttgacttaaccgccagatcaccagcagctcattgtaggcaggcgcaagtaaatatctcacctcaaatgcaacaagtacaaaatgaatgcatcatagtgtcccaggcttccattaaacaaaaacaaataaataaaacaaacaaaaagcaatcttttatccctcagctttattaatgcataactaacaaataaaaatggtatatatatttatggtgtacatcatgacatttctttccgtgtatacaaaaagcaatctttctgagtactgctcagttaccactacctctaagtgatcctgtgtattccacaccctaagtgtccatctgaccttcctcactgccctgtgtcccagcagtctctgccttctatcaagctttcctctttgctttcccgcattaatgaagtgctcctctctcttgccaccctgcctccaatctcgccctgctccaaaccttccattaaaccacatgaatctttctaaaatgtaaaattctgcttattttacttaaattattttagtgactccgtatcacctatcatatacatctttcttggtgtgatatgaaagacccctcatatatattctgacccccacctacatttttagcccctctcctgtcctaatcccaaatgcactgtgccccaactattttaaactatttgtaaaaccctgattataggattatgtcaacacaggagtctgtgtgccttcctccccttgcaaatacagttgcctgacaaactccttctcatcccataggatttgactcaaacatgaccttctttgtggtgtcctccttgtttcctcaccttctcccaatccccaaagtcagtccataacattctcctaacagtggatagcatgtgccatgctgtaccaggtctgctgatttacatgtctgtcttctgtgctagttgtgagctcctcaatgttaaggaccacatctcattcatctttgtagtcccagacactaacacttcccaggtgcatggtaggggctcaataaacatttggttaagaaattaattgatgaatcacaagatctgacatgtttaaatattttattccatatttatagctgcttccatacaaattatgattcccataaaacataggtttacatttaccaaaaaaaaaattaatttgggggtaatccaatacatgtacatggccaaataatgaaattcagtttaaatcttgaaatggccctaaatcatatgacctcattgatcagattaataagattatttctaaatctcaatttcaccagtgatgtttaaacatatttttgacctgccattggaatacagaacaacaaaggaaacatctggttgttcttaactttggggagacaaatccatttgttaacagtagcaataggagagctgacagaacctgataacagctccaacacagggagctcagcccacaacagatggaccagacacttcagggaaagctttaaaaagatgtcttttctaattcaggttatacactccttgaaagttccttcaacataagcatgaaagtttgcagatgattttatcaggtctgacagcttttttctagaggttagtttgcaattgcctctcgggaatagtttggttgaatttcactggattttgtaagtaaaggcaggaatgtttctaataagtcaacaaactgaaagtcctaagcagtttgcatcactgccaactttctgagtgcgacccttggctggtcagagtttgtctgtgttcttttttttttttttttaataactcttcatcagctaaccaaggttaacccagagttattgctatttcttctacatgttttggacatagtttaatagtaattatgtttaggctctaatgatgtaaaaaaaaaaaaaaaaagaaagaaagaaagctcaaaccctggccagtgcaaaattattggaaagcattttaatacaactatcttaatcatatttctaaatatgttagtcatgtataatagttacattgattctaatcaaactctccaaacattctatcccttttcaatgccataagacctatatattccctcttaaactgttaaattttgtagccatttttaaatggtctaatttacttttggactcaccaaataaaagatgcctaagttgattattaaatcattcctattggaatagaataaagtacttaatcatatttggacaaggcagtagttaataagaaccacacactgaagtactttctaatataatgtccccttacatacactacaattagtaaattgtttggtatattggctttaaatggactggcttcagtaaaattttggttgatacttaatattttttaattattttcaccagactttggaactgttttcatagctggagaaactgatccacaggggttaaataccaaagcacacatcaagttagccataaaacctagaattgcagtaattacacaaactcacacactcacagacacatttttaaactccatccttaatgaaatgctgatcgatgaaaaaaaatcactttatttttcttggcacattattttccaagataggttattttagtgtcaaagtttaaattaacagatggactggataagttcatttggaaatgatgctatagtatgctgcataaaaatgaaaattttctttcccaaaatttaccagaaggtaaaagacagagaaagaaaagaaaaataaatgaacatgactttggagatagaggcatcgataggtcaaagagttatggaagcagccttccaggactttttggaagtcttggccttaatttctcatcttccaagaggacagagattctccaaaatatcctctcttaggacttctcactgcctgtcatctggtttttcctttatttctcacattccctaggttcccaaaggagagatcagaaattgagaaaacagaggcactagagaaggaacattccagtccctcttcacatcccacaggtctgagtcctaggcacctacagcccaccacttaggccagcttgactgcctaggaccctggctccgacctgtgcagtgttctacagatggacagcatagcacctttggcctgcactgcaacatcagtccccaatgatcaagccagcagagaagtggccatgccttaggttgtggctgactttgcagacagagaaggaaaatgaaagagtgccttaagttctacttctcaaaaaaaaaaaaaacttttgggtactaggcttaatagctgggtgatggaataatctgtacaacaaacccccatgacacgagtttacctgtataacaaacctgcacatgtaaccctaagcctaaaataaaagcttaaaaaaaataggtctactgctcccagttaaacgactgcatcattcactacagaaccggagacaatttaaaataattataacagaggccgggcacagtggctcacacctgtaatcccagcactttgggaggttgaggtgggtggatcacttcagatcaggagttcaagaccaccctggccaacatggtgaaaccccgtctctaataaaaatacaaaaactagcatggtggcgggagcccgtaatcctagctactcaggaggctgaggcaggagaatcacctgaacctgggaggcagaggttgcagtgagctgagatcacaccttcgcactccagtctgggccacaaagcaagactccatctcaattaaaataaataaataaataattataatggaagtgcagtcattctggaaagacacagacttaagacagctgtgtgactttggataggttacatgatctctctgagcctcatttccctcaatgtaaaccgagaagggtgatacctattctggagttcttttaatgaggatgtaagcagagctccagactcatgatgaatacatggtacacatttaataagtgacagctaaatacattatacctttgcctgattttaggagagaggtcataagctggatgtgaaaatgaaccaaatcactaacaaaattgcagcaccctgttggagacggtaattttttcttaatttttctgcctacaatttcctaggtcttctaattaacattgtgatactttagcttgtagcctagcagtcttgttcttgtcctcaatattaagtatgctcagtcatatttttagataacttaacattgcatatttatttttagacagcccagccacacataaatgaccaatacaaatcaacataaaagcagttcatatccaaagtgcccagttttaaccctctgtagctggcagttccatttttaacgcgaagtttcctaaaatgtataatctataaaactaattttatagaaaattgacactgaagatattaagaaaaatcaaagcattttgtggtcaattaaattggggagatggtagggtaagcaaagttaagaagggtttttttggtttttggttcggttttgctgttttgttttatcacatgaattttcaaaaccttcaacattcgaacatacatgacatagctctaaaaaggtaataggagtcctacatttccaaattttatctgtgctcagaaatgacattaggtgacattacctgaattcttctattgtctttttgtagagacatttgccataggcacaataataggggtgatggggcaggaggaagggaaaaacagagtgaaagaaggagttccagagtaactactctttaaggcagggatcacagatcctaatgcctacaggagaaagtgaaatcaagatcagaggtgggccagacacaacccaagagaagatggtaggtcaatggcaaacagcagatcatatggtctttctacctcaattcacacttttaaaaacattctgtgcacctgtatatgtctgtgggccctattcaccatacattgcaagcatgaagcccctattcttaggagactgctttcatttttatttcaaaaacagcaccaacttcaagagtgccttcaaagacccaaattttaatgtgttaaagggagggaaaaaaagatagagcatattagagcaggaggtggctgttcctctgtctctttgtcacagctatcactagacccatctcaaagttaagagatgggatcctgtttgtagttcaacattatgttatccacaggtggatggataagacctgcttatgcctttggatcatttatattttaccagacactgttccatgtgctctacttgtagctcctcattttatcctcacaataaccctatcatgatccccatttcacagatgagacacgagagagtttaatccactggcctgtagctacacagctagcaagagacatagctgggattgaaatccaggttgtttggttctaaaactcttaactattatgctcaactcagtcttggagatgttgttcccaatttgaggggtctatcagttttaattgctttcagctgcaggtgacagaagtcccagctaccagtgtctagaacaagttttgtttttgttttttttccacaaaacaagaaatctggaagcaggtgtctactggcagtagggctgtacctcagcaatgtcagcaccaacttctgcatgctggtcacaagatggttagttcttcactgggcatcatatatgaaatcaagaagcaagaaaggaaaaggggtggcaccagccttaaaccctttcccacaaggccccatcagacttcaacttatacctcattaccagaatgacatcacatggccatgtctagctgcaaaggagtctgggaaagcaaatatttctcttttcaagccccaagagtggaggcaggaacaggaaaatctcgttgggaacagatgctggcttagccagccaacagtgtggaccacaagagatttggtttggttaagaaaataccaacagaacttcatcatacagtgtatcacccatgacatgaacccaaggaaagttaaatagcaacaattaaaagtttgctgcaaaaccaaaattgaattatagaactcctattaccttttaaaatatctgtttccattcatttccaaaaatctgaaattatctgtaaacattttcccaatcaaatctgtctaggtagtgtgtaaaaattacttgaccttcacacacccagatacttttagttatgctattgttagttatgttatttcataaaatgttatctccttatttacagttgataaatgaaatgatgattttcaatacagtttcaaaactggattgaaattttgttagttattagaaactagaaagtttcagtgctgaaaatacacaacgggttgtttgtatttatcatctattttattttccagtttgcattggcttttctgggtctttctacaactttaattgtaaattttttcttttatatttttatcatggcactcaaactcagaaaacctgttaaggcaactacataatgtgatctaaaaatccagttaacatattgctatggaaaccaggaaatagaaacagcactctaatcattcctttagacaactatggctctgtgtgtgtgtgtgtgtgtgtgtgtgtgtgtgtgtaaaactttttaaattcattaatttattcatcttttattgaaagctgttactgaacccaaaatctgtaattgatctgtccataaataggcccagtgccttattaccagtaaattagtgttttttaatgagctatagtcattgataaattatgccatgccgtatcaggaaatctccagtcaggccgcgttgtttatttagcctgctgaggcctcttggtatggtgtgaaggacacctgactgggctgaaagctaagttctaactttgcccctcttactaaccagctatgtgactctcctgggaacttttagggactcagtttctttacctgcaaaatggttcaatgcaagactttagtaacgtaatgggaactttccttttccataaaactggggaatcaagaggtaatctcttttgaggactgaaatcactcttatgtaacctctggttacattatcatttccaagtgcctggcacttgggaaatgataactattcttactacatttttctatgtttcattctgtagtaaataagaactgaacctgcatagtaactgttattttaacccatgactttcaataacgaagatatctatgtctcattatctattgccatgattgaacaagttggtatgagagccggaacgaactcaagttctaaccggcaatgcccgttccttagatcctattacctttgagtgttcatttactcttgtaggtgccaatttttatagcgaaatacaaagttatcccaacacaattactcctaatagagttcaccgaggccccaaaagctcttttttaaaaatcatcataagatttcaacattcaagaattaaacttttgttctgttgtgcttattcatcgctatttgcccagttatttaatcagcctgcttccggctatggaaaaaaaaaaaaagaaaaaaagaaatggaagtctcctcagggttaaactcctctgttgttcttccttgcagaaatttgagttattatagtagaggataatcgttgcataatgaaatcattgggacaattcgtccatccacttctacctccgcctctaacaatgaactccttgtttctgcggtgcccaaatctctctaaacccgggtgggcgcggggcggttagcggagacgtgggagaggccgagagcaaagctcgcgcccttcccggggtcagcgagcggggtgccaggagggtgcgcgccctgcatctgagcccggggtgacactcgcctcccaagcgccaggagggggagactcggtcccgcttatctccggctgtgctaacttcagactgcctgagctgggggaggagagcgcgcagccagggcgagaaaacttctccacctagaaagtttcaccttgtcgtgggcggggcagaggcgggaggaaacgcgacccccgcggggccaggcgcggcgcggacggcaggaagggcgggggccgatttccctctgggtggtgccagtccccacctcagcggtcctcggaacccgcggactaggggacggacagcacgcgaggcagacagacacgtgctggggcgggcaggcgagcgcctcagtctggtcgcctggcggtgcctccggccccaacgcgcccgggccgccgcgggccgcgcgcgccgatgcccggctgagtcactggcagggcagcgcgcgtgtgggaaggggcggagggagtgcggccggcgggcgggcggggcgctgggctcagcccggccgcaggtgacccggaggccctcgccgcccgcggcgccccgagcgctttgtgagcagatgcggagccgagtggagggcgcgagccagatgcggggcgacagctgacttgctgagaggaggcggggaggcgcggagcgcgcgtgtggtccttgcgccgctgacttctccactggttcctgggcaccgaaaggtaaaattgcagcccctttcagatccagtacccaatccctcgcctcaggggttctgctttctttgttcccctaagagacctgactgctgttccagggggcaaaaccacgtaggtgggctagagtttaggggcttcggaaactgaagagacgtggccacggcgaggacgaaactagaatggggcttgtctttttagggggttgcttctgatggccacctgtatgacttaggagggagaggggcgctgggacagtgggtgatgtgtgactgttacggcccagcaagttttaaagctgggatctgactcagcccttacaaaagggatccggtcatcctcgtcccaccgtgatgcagctggcaaggtttgagccgagctgtttccttgttcccagccttgctttatctgtgttatgttggggtccttccaaggggcaggtgtttctgtgaaagtctgaattcatttctggcaatcacgcggggcttgtgatccatcaattttccatcgtaccttatctctttctggggcttgtggtggacatctatcttattaggtgaaatagattataaccagaggctgagcgatgtggccagtcgtagtgctgacccgataattaaagcaccagtgaaagtactttccctgactattgtcaatgcagaatttactccgaagtacggtttcccattcatatctttcatgttttaaaagagccatttgctaatttggcagttggagagggctccaatggctcacgcatgaatagttgcccagtgtattttaccttatcacagttttatgttcaaaggagccctcgggcagaatgaaatattgtcaactctcttaggcaaaataatcaagatactttaattgctatgttaagatggtccatgaatgtgagaggattgtaagaactgacgttggaggcaatatagactatctggaccctctcttgaattttaagaagactgttcacattctgtagctttgggtgggggtttattctgtcgctttcatcagccagacacatgcacattgccatgcaaatggattcagaaaaacattatattcccttacagctaaactattatagctgactaatgaattttttctgcatgaagatgatctgaaaatgatgtacatcatgtttctctgtgctacagggacataaattgcatttttatgtaaacagtgtaagtggtgcttggattatttacaggtacatagctttccttccttgatctaagctaattgagctttgttttgaacgtgtaaacttccataatggaacataagtgaggtactttggttcctatcatttgcaagtctgtggtgtattcaatgttcattctttttgaactgctgaataacagagggaaaatttacatcattcataagaaattttggtagtacaaaaatgtgtctgatagcctataaaatgtactgctgttttaaaaattctattccgttttcaaacttaatggtgtataagctatagttattaacttaaatatattttgcttttaacatgatggaatttgtggcatatagaagacagtctgccgactactgctttttcaaaattgctttgttcttgatacatggcagtaggggtttacattagatgtatactacatgctttcaaaattagttgatggagtttatcttcatgataaaaaatgtaccagattaatcatagccagtcaatacgaaagctcataactaatattttcactacttttaaacctataatagagaaaaatgaccctttgctaagcaggagaaatacccatattttataaattccttttaagactatgtaagtatatgccttgcattaatcttgaaatctttaaaaaaaaattgtcttaatgagggctagactaagaaatacatttcaaaaatcaatttccttagctgtttttaaaatagtgtttgaagtagcattagtcatattatccttctgcagatctacataatagtctcaaattaactttttctcaaatgtggtcatctcaaaacaacgtgaataactcagaggagctaacatcctctaactggcttattttctccaagtggctgcaccaaagacatggcaacacccccatggtgagcacagttcctcacacattcagattacctcccatttctctgtcctcttcctcctcaaccctttcccttggtttggtcagagctgctttcaaggccttccgtgcccccatttctccagcccagtttgctcgtttcttctttaggcattaggcttagtgattctcgccagagccatctacgctttcttttccgtggtctaaatccctaagatttccttggtctgctgtgtttattcataggatactcaatttcctcattgtgccctcttaaggggagaaaatgtatgtagaaactcaagtgtccggaagtgagccttcttttcctggctggtgtatgctgaaactagtgtttttgacaccaagcccttagggcagagtttcttcatgggttttgctcagtgcaaaataaatagtcacttctcagtaataaatgatagatacactgactaatgttagttcagaatcactttgatgatgtgttctcaactgacactgagttgctgctagatccacatttgcctgaccaaaaatagctaggacctataggtagagtatcatatgtgctaggtactacagcattttctttaaaagaaagaaatggaatctgcccttgagaagtttatgatctagatacacagacaaatatcacatattaaatgaacacaaattcataattattaagaggacatcacatgagaaacgctttcaaaatcatcctatttgctatgaaataatagaatttttttttaaaaatcaaagtttggaacttaaaaaccttaacattttcaagctgtttctgcatacatcacctttctgataccaaaacgaccttacaagataggcaagtctgataacatcttaacattcttatgttatagacaaggaaactgagcttgagactagctccatgctatttcaatagcaccataccacctttcctcagccatcaactattggaaacattttccatggaggcatcattagggatgcttaagatagtggtaaatgatgaatataacatatctagtccctggagtttttgtcaccttctctttctccagttctctctctcttttttttttttaatttcttttcttttctttttttcttttctttgtagtgagacataccgagaaaaggtttcattcatatgtgtggggcattctgctcctgttatcagattaagagccgtgaataattttgtaatctatccttctatcagaaagcccattctcagatatcttttcagctgtgttaaacaggttagtatattccgcttgggatttgtttcaataaaaacatccagtaaaatctgactactttgcttttcatgggacaaaatgaaaaaagtgcttttataagctgtaaaacttaattgagagaaaaaatcacgtgtggcatttgtagcaggaggtatgagctcagtgaaataaaaaagttaactttgtaatcacatacccaggtacacatatttctctctgtgattgcataaatgtgtgcaagtatgtttatgtaggttactcccattgattttaatttctataataaattatgtagctatagggcccacaggcgattatataatgggcaatagaatttgaaaatgtatctctcctaatataattaaggatagcaattatgaaatgtgcttagagaatcacaagttatcgtgaaagccaggttcctgtactccaagaatgtgaatgaggatttagtcattcattcaggacaattttttgacaacctacgaggcatagttctaaaatctggcatttccacagagtataaaacagatgaaaacctctaacctcatgacactctgttctattgagttggcaaacaataaagaaatacataactgaaatgtgttgtatgtcaggtgatgataatagcttcaaggtagaataaaatggaaaagagaatagtgactgtcaaggataagagagagtgggatggtgattgaaaaactcaatagtgaggtcagggaaggcttgtcttcaaaggtgggctttgggctagaatctgaaggagataaggaagtgagccaggcgcatatgaggagcacttctcaggagtgctattctcatcttgtttttcctgaaattgtgcagttcacagcttgcacaactgtccatagactccctgattttggagggagatacctgaatagtgcccctgtttttgtagggaaatacctggacagtgcctgccatcattagctaccatgttaaagatgaagatacaggagtggcccacatctcttggtttatgagacatggaagaagaagacccagagtgttgttttgtttttttttttgtttttttgttttgttttgttttgttttgttttgcatccgcctggtcccatcccatactccatcctctatcagagatattgctccattcagacaattttccttcttattttccacactgtgagcctgtcacagtgggatttgttgagaaggatacccatggcttttttcactgatcccttccatagtataaatctaaagacagcaagaggcagttgctgatggtgtgcagcttctgtctgctatgcacttctttctttccccctcgctctccttccttttcctttccagtattaagtcactgcattggattttcttcctcttttcttccttttcccttattcccctatttatatcctgtatcaagatttgcaaacaggtaacttaaatgaggaaaactaaccatttcactagggattgacaaactgcttaggaaaagcagaggggcagtcactgcttggcgtgattagagctgttgtgaggctcagtgtatggcatgggcccatgtggtagtatctttcagattttcaagagaagctaggactctcccaattttaaaatgttgactcagtgtctttaaaacaccatacagcttacagtggcagaaagtctgcaagccagattgggctcctgatggtcccaattgcagcagcatgcatggcccgagagccccaggactgcttctacaaaatattttattttctaaaattctcagaaaattaactaaacaaattttttaaaaccaatattttatgtcagttcctattggcacgtggttatttttctaaactcatcagcccacatactttacatcaaactatgtacgtttctaaactaaagggtaatctagttatttcattcttaaactgaagtagtagttttctgaaacctgaatccatcatggctttatgcatcaatttcatttccaagttctctgattcaggataaactccccctttggaatattgtctttctctctctctctctctgtctctctctctctctgtctctgtctctggaaatgactgaacttcacccgttgttattaccctgccattgaaattcaaaacatgcactgccctcctggtttccagtgccctttaaaagcaatcagatcagtgttaaaatctatttttccaaaggaataaaagctcacaggttgtgcactaatttgtttcctttaatcctaaaatctcagtgaaatgcccaagctagcagccctccagaaggccactgtgttagaaagggagattatgtactgtatttcttcctactattttaaatgcaaatataataatatatcatgaaacagtgcacatacagtatacatattaagatcagtggtctattcctgttttgaaatggtctcctactccttaatagttggaattctgaggcagcacctagactctcaggtccaatttgaaaatgtatgtttttttttaaaaaagaatgacttggggaataactgtttgataagaccgtggaagatttctaatttttaatattttattaaaaatgtaaagaaagacattcaaagctgagacctttgaaataatatggtctttgcaagtcagagaaaaagagaagtggtaaatttattagagataggttgcctcctttgaggcctaatcatgtgggaaaggaaaacccagccaaggtttgggtccataagacaattcaacctagctttaaaaataggttttggctttgcttgggaccagcattgggaccagagtgtatctagaccagcattttagctattaaattttaaacctaggggtcttttaagggaaatttaatccatgtgtctttgattcactaaatcttaaatcattactcacaaactgtatgtccctctaagctctttgatgtccaagagatctctaaaattgtgtaaggcctttttgttccagaaaaaaataggaagttggtttttgctaagcgtcaataaacagcatcctcaaaaatctgattaggtctaaaatcttgcaaccatgacagtatggatgtttgaatgatgcaatgtgaaaattttaagcactttttaaagtccttgtttaccagtaatactcagttgtaatccttactaaccccaaggaaattattttgacacatttcctctctgttttgtaatataaatacaaagcccaaatattcatcattttattctggcacatagtaggtactcagtaagtattttgtagagtgttgaatgactctttcttctgcccagaaacttctagctaatgtcagttcttctattcaatattgatatccatctgtcataccttggaataagatctattctaagtcagtgaccttgttcgacaaatttttaaaataagccatctaactaaatatatgacatttattgaaattcattttgcaccatgaagcaactgccttgcaaagagtgctgaaaataggaaggaatttctagactaatttgattaaatattcagttgttgccatatgctttctgaaaattgattttcccccttttactattcctgtcatccttcctcccaccttgacatgcttactgattgaaagctatgcacagaaaaagggcaggtcgcttgtatgtataagcaagagcagcaagtccaaacaggcttagaaaacgtaatgctataatcacgagttgtcataatataggagaggggagagaggaatactcagcaataagagtggtgttgggtattgctccaaattacatggatgacacatctttgaactctattgtgtcgggggaaaacaccttcttgctgtagttagatttcctgtttgtgaatgtgtattttctggtaaccagacttcctatatgaatttgacatagctttaagtgcatttcaaatgacatgattaaagaatggctgctttggagacagcagctccttctctcttaaagaaataaactatcatgctaaaatataggcattgagatctttcttgataccatattgtgaatttctaatggctcatcacatttttatcctcagaaaacctttcctggtgaaaagcatgctgttttagtatcacatttggggtgatggaattggcaatttcttatatcttgagggggcgggggggtaaaaggaaaattgtgttaatagggtcttaaaatagagattctcttaggttaacctgaagatttactaaatacattatcattacagcttgttttgacatttaattgtagatggcactgtatcagcactgacttatttatacagctttgtttagacatgcctaatttttatttcattggtggaaccaaaccatcagtaataaatcatatatcagtgtttttgtacacattcgtatttacatgacttttaaaattccaatgtaaaggtctcacaacttgaaaaatgaatgaatgcctgagtatttgaacagttgggaaaatgtagttcaatttaagaaagattttttatgacaattcttatgccatatatagaaaatagataataaaggagaaggcctggaggtttagatgggatattggatcaatgagcaaaggaaggggaaaggtgggcgggatatgctgaagggtcatgggcttgagtgcaccctaagtcataaagagggtgtcccattaagaatcaggctgcctgaattctaagtaggaaagaggcaggtcaaaatggtgtataggccaggcacagtggctcacgcttgtaatcccagcactttaggaggccaaggtgggtggatggcttgagctcaggagtttgagaccagcctgggcaacatagcaaaacccccctcttaaaaaaattacaaaaagtagctggacatggtggcgcacacttgcagtcccagctactcaggaggctgaggtgggaggatcacctgagcctgggaggccaaggctgtagtgagccgagatcataccactgcactccagcatgggtgacaaagagagaccctgtctcagaaaaagtgggggagggagggtatggaataaagtaaagctcatgggaaaatggtacctttaccattttcccaccttgggaaatggtgggaaaatttagacattgctttacaaagtctaaatttctgccaacttgtgttacatgtggtttgattctggagaaagatagactatcatctatccagtcctaaattgggcctcttagtctgtcctcccctcagttaccaggaagaatagcaggaatatgtcacagaagcagagaaagcttttattctgagtgtcagaggcatgttctaagcactctgttatctactcccaggcactctaaatgaaattccattttctctgaggaaatcaaaatataaaaagaaaactcaggcaaatttataaaggttttacaccattttcatgactgaaatattctagcatatctagctcattataatctataaattcctgttgggaccaaaagttatggccctaaaacctgttatctgtaatccttttccactgggatattgtctctggggatatatattagctttccttgaggatactaccttgaaaccatttctttggtccttgactatacaaagttcatactagcatggatgtaggaattgtatttttctattctaaatacgaatttagacagtgatataaagattcaaggaaagcttctatcaaggcctgccttcactacttgtcttttggctcctctgagggtcttaggtgagccactttcatctgattctgccctcacttcaggcagaattcatatggctccagccaatggctacactgtccaaagtgagactgtggtctcacaaccatctggttaatacaaagacagcaagccaatatgatcacttaggacctaggcaaacctttgggcttaaaatattaccttagctattgttgtttttaatgagtatcaaatagtatgatatttgtaatttgtattatgtaaagaagtaaccaaagcagagattgttgacaaaaaaaaaaacttcctcctaacataaatgaatatgcattttggacttttcaaaaattccctttctgtcttgtcaaaattaagatatttctaaattttatttcggtctcactaacacatacttggattattgttcattgaaatctgtacgtcaaggcccagtgattttaaacattcttttggtcttcaaagaacttaccaaaaaaaaattgttctttaaatcaccagaaaagtgcagataaaatcccagacagtttcattaatgacaatgaaaggtgacagcccttgaatctatgtcataagttgattaattactttccaaacattattaaagatattagacgaataacttagactggtatccaggatcaaggttccttcataatccctaaatgggttttaattttcagagttagatgatcattatatgtgatttatttctttaacatctttagactgttggctttattgaaaagagaggagagtatctgtttcaatgtgttttcttttccctgaagttattccttgcagaattcaataaaaccggttttgaaataaaaataattaaatgctggcattttctgttaataagggcccatagacctgatgaattatataaacattacaaggaatttaccactgagttcataattatgtaaccatttaatgcccaaacctgcctactgacagtgaagacgttcaatgagaatggacattgtgcattaggataaggatgacctggagtgaactttcattcttgttttggttctttcccattttgcccaattcatagcacctgattctcttaaccagcaagtctgtttgcatgtctccagtccaatttttcgccatgcccactgcagtgattccaaactctcaccatttcttaagctcttgcatcttttgggctctccttattctcagtataagatctttccttatagtttagagagtaaacacaagcccagttgtttccatgtcacccattattacctctttctgtctcaaaggatgaaacagtcttttctacctaagtcttgaccctgttgttccccacacctgtgagcacctcctccctctatcctacccaccttacaactcttcccgtgtttaaaatctccctcaccatttttcttttttaaaaaaattatattttaggctcagtggtacatgcgcagatttgttacataggtaaactcgtgccacagggtttatttcatcacccaggtattaagcctagtacccaatagttatcttttctgctcctctccctcctctgccccctcaagtagaccccaatgtctgttgttcctttctttgtgttcataggttctcatcgtttagctcccacttataagtgagaacatgcagtatttggttttctgttcctttgttagtttgctaaggataacagcctccaattccatccatgtttctgcaaaagacagaatctcattcttttttatgtctgcatagtattccatggcttctctatttttcattcacctcttactcaacttactgattcttctagaaagaaataaaacacacacatcaggcatcctgataggatcttgaatacacaatttccttaagtagtcactcctgttttcattttagcctttaaataatgaattcttgaaaataaatgtctaactcagtttctctactttcttcattcccattcattcttaagtcattcaactcaagcagtctgtaccacatgcccaagaaagtgtcctcattctaatcaccagtgccctcctcatggccagatctgatggacactggtttttatcccttttgacccgtctgtagaatttgacaccatacattttatttctcccttctcgaaagttctccttagcttatctctccacattttctttgcctacaattgttctttttaccctttaaaacataaaggttagattctagtcttctgtaaggctccatctgaattcctcctttctacttacaaaacacattcacaagtgatctcacttcagtgacttccaatacaccgatggacgagtggttcacaaaccgctctctctcacttcctcttttctctagaccaccactttcatgttgtcagctaccttacagactccaccacttagatgaccagaagctacatcagggttattaactcaactaattacttttaccctcaaagtctcctctccctattttccttaccttggtttatgatacccagatagacaattttttagccattcttggcttttcagtctcctctacaatcaaaatccatattgaataattcccacataatttttctcactttaatatgtgtataatctagtccttcctttctttccataatgctagaaactttgttcaggaacattcttttgtatattgattgattctgttgtccattcattcaataaatgcttactaagtgccatgtaatgacactatgctaagggctaaaagtggagcttacactctgatgggagacacagataaataagttactatatagtgtggtaaaggctagataaggggaagacaggtttgatgtttgagcacataggagagttcctaattccttactagaaggtaagagatgcatcagagaaggcttcccagaactgttccctaagatgaggcttgaagagagaggacaacttatccatgtgaagttgagggcaagaatatccataaagagggatccacatgtgctgaaacccagagtggctgagcacatggcttgcttcaagaactggaagagggcagagtggccagagcctagatttctaatggtgtgatggcaagaggcaagactggagagtggggcagaaaaaaatggtatgtggtttgtaagctctgccaaggggttgacattttttttcagcaaagaagtgacatagtcaaattgtcagtttagaaagatatctctggtatgctagggggcagatgatcagggtgagaatggagagggaagaccagcgaggaagctgttgtagtaatccaggtatgaagtgacactgccctgaccatgggcatggaagccaataaggagatggacatgtttaaaatatttgtaggtgggtgtcaaagatgatgtcctagaaatatgggacatgttcagcactgaggtaggatacagagagggagaccaggttttgtgggagtagatggagataacagaaggatatccaactgctccttcttggtctcttgtcccatctgtctttgtctcctgacctattagctttggtggcgccatcactcagtcctcctctcttcattctctacagtccctctcctcggagatcccatccactctcatggcttttcatgatgtctacatgctgacaacttcttaatttaaatctctagcccagacctttctccttaaccccgggactcaaacatccaactgcatgcccggcatctccacttagatgcctaaaaaatgtatgtcaggctgagtgcagtggctcatgcctgtaatcccagcactttgggaggctgaggcgggtggatagtgaggcgggtggtggtcaggagttcaagaccagcctggccaacatggtgaaaccccgtctctactaaaaatacaaaatttagccaggtgtggtgatgtgtgcctgtaatcccaactactcaggaggctgaggcaggagaatcgcttgaacttgggaggcggaggttgcagttagccaacaccacatcactgcactccagcctgggcaacagagcaagactccatgtcaaaaaaataaaaataaaaaaacctccattgtgggcaaaactacattcctggtctcctcatatcctacaaacatgcttcaccaaccagagtctgcatgtcggtaactggcaaagccattctctctgttaaaaaagtcaaaatccttggcatattctcctttttttctcacatgcctcagatctgactccatcagtaaatccggatggagttcgatctgaggcatgtgacaaaatagctctgtcttcaaaatagaaccagaattcggccacatctccccactctccccttccttcctggcccaggccaccagggtccccctcctggaacaccactggagcctcccagctggcctcaccactccacctttgccctgaactgccccccagccactagcagtcttctctcccatatgatcgaggtgaatacattccaacataatccccccttgttcaacaccctgcaatgactccccatttcactccaataaaaacctgaatctcccaggggcctacaaggccttacatgctctgcttctttgtccttttgatctcagctcccggtcaacaaagtccaggcttactggcccccttgctgtgcttcagacacaccaggcacatttagttcttccttcttgcctctgcccagaaatctcttttcccatctcagacatctgggtccacaaaagccaccttcccaatttccgagctacaaacctatccccatacctctcctccaggcagttctgatgccccagccctactttttgtttttccctgtaacacacatcaacttctgaaacactacatcatcagcttgttatgggtattaattgttgtccccagctaaaaagtaagttccacaagagcaggggtgttgggttttgtttactgatgtatcccaagcatctgatgcatagtaggaccccagtaaatacttgtcaaatttggtcttaaatagctgttgcatagacaaaagtgatattggagagatggatttcgggattctctggagatccttcaacaaaacatatcagactttctttaatgtggccacagcctaatcttatacctttttccactgtcaacccagcccacctggcctctatgccaattgcagcttcctggacaaccctgcatcttctccccaggtgcccgtgtgtgagtccactccacccaaagtgtctgtcccctacctcagctgcacctgagcagctccaacttatcctgcaagacacagctcaagtagtatcccctctgaaatactccttggccccgctttctgtctgcatagttagctcttctcccccgtgctgctccactgacatgcgcacacctttacagcacagcctgggcgtgttgcaggtggaaggtggagattcccagtcaaggggcaacacctgtatggttggaaaagttgtttgttttaatttcttgccctctcttctctcttctatttctttcctctcccataaatacacataccgcctatatacacacaacctgccctgaattgttttccttgaattgatgagttacgtaaatgcaatcctaagcacagttgttttcaggttgtcctaaccttttgctttattgatttttcaaggatccagagtgtttactgagtttcagaaattggattctgtacttatttttctgtactatcctagttttatgagaatctatttgctcagcattctctattcttttaaaagtgtttaagatttttgtaaacagttttgtttggttctttattttctggtgacatattgatctcaacataatgctattcatatacttttaattcttcttccaacactgttaggattgcattatgttcacccaaggaatccacatctgtacaaaatgtggccaggtttggctattccttcacattcacagtattctcatgatttctaacaattcttgtctactttgcctaaataagaaaatgtcatatactgacaattttgatcgtgaaaaagagaccttagttcataccagtgtcagagtctacttgcaaacattgatttccaagaaaatttctcaggtgtgagcaaataagcaaaataaattcagacctaagagaaaatagcactacaaggaacgcccagctcattcaaacgctctgcattttgagactagagggggcttggcctttggcaccctcacacctctcccctttgtctctctgtccctgggtgctgatttctctttctttgtgtgacagccactgtgaaaagaatggggttcactcaccacctgcattcctccacagccatttgatatctgctttcgataacagcagaggaaactgatcagtcatataaatccaatcctgagcatagttcctcgtttggaattgtaccatgctttatgccgaggacattttcaaacacggagggaggggatgtctgattcattcgtgagtaatgtaccagcttcctctccaacttgtctcccttcagtggttcacattctgactattcagtcggtttatcctttccaaacccagtatttgaatgcaactggcaaaggttgattgcctctttttttttttaatatatagacttggaaagatgtttctcaaatgtgatttgcggatttatgttattcagtcttcctggattaattgaacaaaaactggtaacactgctacacagtctgaatcacaaaattatgtccatccatttggctgaaaaatacgaaaacaaatacttgtataagttttcatgcattttagcactttctttacattggggaagttcaaccttcacactttcaagggcaatgaaacatttttgtctgacctacaatttattaatgggacaaaagcccatctgtcaatcagggctctgagagttcaatgtattttctgaacaatattttttacattatgtacaatggtaaaaacaaatgtccatttattcttctttccaagaagttgagtactttcaaccattcttaaaaggacaaagatgtttgctgacagaatatgaatttataaaggataatcttgaggatataatggcattctattctttttatctttactcttgccatatcagagttggataatagtctcaatcatatgttacaactagaaaatgcacaattggctttttcttatgctaacaggcagccattttcaactttttaaatgattataggactaagaggggatgcaaaaacagataagaatctgaataaaagcactatctgtcaaagaaacaacatttgtgtaataatcaagaaaccgtttagagcaccccctggaaacattaattataacacatgcaaatcattcctgtacaaagcttaacttgtttatctcctatagccacctgtatttgaattttttaataagctcatttattataaataaagcatgtaaatcaatctgggaataccttttctgtttcagaaatttcatgtaaatgacaggctgccacatacagtacaactatagaggggaaaaagtttctttactccctttcatatagttataccttcatatgacacttaaaaccacctgccaggaacttttaaaacatgttttagatgcacagaagcaaacccaaatgaaaaaatgctatgcagttttgcaatacatatataccacagaaagctttaaaaacattctaccccaacagataaatagatttggcccaaatctttttaatgtgagttttgtgggtaaaaaagattattgttcccttatttttccccatttgctgacgactaggattgtcatataaaatacattcctgggacatgcttatactaaacaaattatccactgtttatctgaaattcaaatttaactcagcatcctatatctttacttgctaaatctcagttgggatatgggcttactctttttttttttttttttttttttttttgagacagagtctggctctgtcatccaggctggagtgcaatggtgtgatcacggttcactgcagcctcaacctccctagctcaagtgattctcccacctcagcttccacagtagctgggactataggcacatgccaccatgcctggctaatttttttattttttgtagagatggggtttgcccaggctggtctcaaactcctgaactcaagcaatcgtctggcctcagcctcctgaagtgctgggattgctggcgtgagtcacagtgcctggcctgagctaactcttttttaaagagttaaaatactggttcctatttgtttttacttctctagtatgggaggctgttactgtggcttctgtcttggggggcaattttcgaagggcttcaagaacttgaaccgaggttagaggaaaaccacaagatggctaaagggtgggaaaagaagaaataacactatttaaactttagatgagaggactaaagtgatgaaacagtcaccaggtatttggagtggtctcacccaagggactgtgccaacttcctcattttttatgagggcaggcaaaaactggccaaaacacaagttaggataataagcatagtagctattattaaatgctagggtgtgctgcataactgaaggacagtgtttctcacagtttatctccaactctcatggccaacccatgagatgtatatcattatccccacgttttgaatataagaaactgacactcaaatcagaaggcatgtcagtgaaaaaggccatattcacatcccatctaagtctgtctgacactaaagcccacactctctccactacactccaccttgtctccagaatgttttgggctgtttaaatgtgattataccaaagagcagttgaatgcactgaaaaattctgaagattcctcctgtcccttcgattcactgttggaaaccattgtcaaggtagtgtctggctacgatagaagggatttttgacatggcctattgttttatctttttaaagtaaatgtaggtgcttttgatgatcataacactaactgttaagtctttaggcataagaatcaagcattcaactaagcatgtttacaaatttgctttcagcccagtggatctatccacttttccatttaggttgcacatttagatttcggagtttatcctgttatcttcaaatccacggactgtacactctttgagggaagaaactcttagtatctagtcaagtacgtggcatgcaatgggtgctcccaaatacttgattaatatcatatgatataatgtaatatgattcttcataaacagtgagtgtttataaatacagtattttaaatgtcattaggaatcttctattggaatcttaactttattttaatagacctacttttaaagttaataaacataatataaatgtggacagggctaagatttttccctaagatttcactctggcaagtcttcctggagatttagccatggctatttttatgactgtaatttccttaatatggggcctcagccatattccatcatcataaatccctttcttgcacttaaaagcaatgttgaaatattttccagtttctatatcttaactctttacttagatccattatttccattttgagattatcttatgtaaatattgtagaagattttagaattatataataagaaaatactagtataccacctcagaaatcttaactaatagatatgttctcaaatgcaaagtgaaatatttaaagtaattattcaagtaaataaagagaccatctttgtcccaattacttgaatattttacgtaaagttggttttatgcacttgactttgtgtttaaactcaagtttgtagtattgtctactggacattgttagctcaggaccttttcaggagcaaggaatgaaagaatcatttttaaacttatttaaaaaaagaaataaggaagaaaagaagaaattttactggctcgccttagcttaagacatggctggatacagatgctcagacaatcacatcaggagcctgcctccctccgtgtctgggctctctggcctcttgggtcagtttcatgctcaggctggctttctccacatagtggcaaagatgggcatcagacatcccaagttaacatcatctttagtgctcatgctgtcagaatgaaagaggccctctcccagcatccatattaaatctccaaagagattctgtttggccttgctttggccacatactcaaccctgaccaagctccgtgtcaagagaacagagttcgttgaaaggccagcctggtttgcacactcattctgtgttgaaagatgtagaccatgtgattgacagtcccaggagataggagagggagaattttcaaaagagttgccggtataagagacagtggattctgggaaggtaaaaagaggtatttattaaaatactgtgcctttggaataaaaatcttttccaggaaatgcaaataatttaaaacaattcaaataaggatcatacattttaaaacaattagaaatacactcagaagaactgaattgctcatttagtagatttcagataatattttctcctctttgaacctcagttttgtcatctggaaacacaggataatgcttaccttataaggtaatcatgattagaagagatgatggagctgaccatatctatttactataaagtgctatctacatagttataaattatgacagctaagaaaattaatccctaaagaaagcaaaattacctatgtcacggtttagaaagtctctctcttaagaagaaacttattctattgcctctgttgggttttttcctgaggaatcggtgtttgaatgcaatatacatttttgtaggctctgcaatgtttttatgatgaggacagtcatagtgttgacaattactcaatgaatacttagagatttgaatgtatcgctagatttctgggaaatgaaaagaccaatgtaagctagttgaatgagaaaaccagaggtgggcagatggtggacagattaagtcgctggttttaaaggtaggctgaactggtatttgtaactattaataacagccatcttctttaaaggaagtactcctaaatatcaatagtttagtggccaaggtgccattgagatgatcactcccaggaaatgttttgccagtgatattaccttaactttcatctgaaaagaaataaagaaatgttttatggatgattcactttcacctgatatgtgcacaacattttaagagaatgaattagtcagtctgtttgaatcatctttacgtgttccttttagcagggaactcaaagttggttaaatggctagctctatttcagaaagcaaaaataacagaaacagtgaaaagacagtctatattgaaagcctgatccagacacatcatgggggaataaatatatcaggacaaaaatatatgaaaagtgaaagtatttctggagtatttcactaccaatataaatattaaaatgctcacacagccagatctggcaagttacatagatgaggaagtgaaagcaataatatgccaagtcaatggcattggtgtaaaatgtaatcatagaggaacaatctcagagttgaaaattattagaattggaaaacactttgaagttctttagttccacccaggagtatgccattaaatatttaataaccatccctctgcgggctttaataacaagccctgatttgtagtgtttgccaatttctatggtgtcaatacagccaccatggctgattttaggctaccaagatgaggtcactgaaacacaagttgggaagagatgcacatagtaggctgtcatgagccagcacacagctggttcagcattataattttcaaataagaaagcagttgacctcagaggagttgggtgacttgcctgggtcatacaaataattagctgcactgccacaactaaacctaggccctctccagtgtttgacctcagaattgtgaatgcattatgaggaaagcaccatgattgattgattggtaagcccacgtgactttctgtcctagttaagttcccctttaagggcctccatagacatttctacattgagtttaaactatagtctgcctatctccactactggcctgagatctcactgacatttggaaagcgttttatttatctttgtatcttcagcactctgtacagtatctgacacttagatgcttataagtgtttgttgggggccatgtacgaacaatagagaacatgcattgacctgctatgtgccaggcagtgttcttagtgatttacatgcattaacttattgaatccttagaataactctcacaagtgaggtaggtactataatcctgcccatattttagatgagaaaatacaggcttagacttacttgcctaaggtaacatggacagtgattggatttaaaccctaaaatctggccagtgcctgtgcacttggcctctcagttgtcactcatttaactagcagttatcatcatagtgcccagctcagcgccaaatacttctaaaaggtctccctcctttccttaggaaggacacaaaacgtttcccagaaaagatctgatctgaccaacacacacctttgttaatggggaagggcctttattaatgggaatgatcaaggaaatggggcgtttttggtgattacattttctcattatctgaggtttaaacagaaacctctagtttaattaaaatttctgttgctgacaataggccctagtcccatttttttctttaattaaaaaagttaacctttttttgatgtattcacttgaaaaatggcatcaccatatggtaacagataatgtaaagaaggtgtaggagattaaggtactaactccaactgtgttctgtgagggtttttctttaaatagaaaatatattcttcttccccactgattttccatttcatcaaatgaagtaacaaaaagcctatttctacatgtgtacattttcttggattcttgtccactgagatttagtacagtgtgtgacttatgtgcgaaccttaagatatgaatcttattttaaaaacataatttaatataatatctctaatttttttgtttttgtttttattttttttagatggagtctcgctctgtcatcaggctggagtgcagtggcgcaatctcaactcactgcaacctccaattccctggttcaagagattctcctgcctcagcctcccaagtagctgggattacaggcatgcgccaccacacccagctaatttttgtacttttagtagagacggggtttcaccatattggccaggatggttgtgatctcctgaccacgtgatccacccacctctgcctcccaaagtgctaggattacagattattttgaaggctccttcaaaaagcctagaagaaaaaatgtcattcacacttcacactgcattaatggacatcaactaacatgcaaattggttacaatatttttctcccttttggcaataataattcgtttcctttctttcattataatttctacagaaaatacagcaataaattatatattaagctcaattttgttagatacactgataccatattgataagtgcagttaacttttcacataatatttatttttcccattgtgctctagatggtttagatacatatttgcagtttggtttacagtttgtatttgccctctagtacaacaaattgtccctaatccttttcttctatcccttgttattccctctaccagcaccaaaaatttgctagtacattgcaaaacaatgagaattacagataaaatagcaagcatttatatatactctatattgatcaaagtgctttcagagatgagatctctttttgatccttaaaatggtcacgtgagaatatctgaccctgggactcagaggtgggtgattgcctggagtcacacagctagagagggaaagggctagaatcagagggctgattgtctgacttctgttctagtgcatgctcccacctcgctttggaagctgcttcggcatagtgaagcacttaagagcatggatgggttcttgttagccagacgtggaattgaatcttggttctaactgtgtgattttagcaagtttgcttatctagaagagaaggataataatacttccttcttcacagggtggtgatgaagagtaaatcaaagagtttagcagaatgcttcccatatggtaagcactcaatacatgttcttgttatttttattattacatggctttgccttactgaggcttcatcttgtcctctggtccaactacagttctctagcttggcttatcccttcataacctgtacccccagtggcacgatcttggctcactacaacctccgcttcccaagttcaagcaattctcctgcctcagcctcccaagtagctaggattacaggcacctgtcaccacacccagctaatttttttgtagtagagatgggggttcacagtgttggtcagcctgggttcaaactcctgacctcaagtgatctgcccacctcagcctcccaaagtgctaggattacaggcatgaaccaccgcgctcagccaggaattttcattctttatcctcctttgagactcggctctagcatcatttccagtcgagttggtctcccttcctctgcattctgataactgttaaccatcaagtgacttgagcttcccagggaagggcatcatgtctttgtagacatccaataaatgttagtagaagaaaggggggtcctgccaataatcatatgtctttcccacaatttaaactccttttcaccctgttactactttttgcttgtcttccctttgataaacattctacttcttcatcacccattccctcaatttaacatctgatactactatagaaactactgccttgaagatcaacaaacgggttccatgtggaccaacgtcctccttgagaccctcacttggcttttgtgacacagtgcaatatttgctctcttgatgcctcactgaccttaaccttccttgactcctgcatagatttctcaactgtgggtatcccctaagatttaggccatttgccttctcttctttcatctagtccattcatgaacacacccattcctggttttaaccatcacctctgtgcagataatgtgcaaagtttatttctagtcggagtggagtctctgttactctgccaatcaagttctaaatttttattccttctagtgcagcagtggcaaatacctgacactcatgtgtctcactcaagacagatactgtttcacccaagactgatcatgccgctttcccagtcaaggcaggcttctcagaatccttctcatttccgcctctgttctttggcactaatgctctgtctgcccagagttttcattcttcacttgttccaggcacctgcttcctggtgaataatgtaaaacctgctagtcatccttataggagaatatgcactcatttcccagcagcacacccgactcaacgtggttaaaaccaatctaccattcccatatattcagcctaacttcccagtgcagtctaccctagttttataacttgttctactttttccagataactgctaatcatctttgtttgtctttgctttcttttttgcactgtgtttgatatattagggtatcaaatcctacttattcaaatatgtcccttattcattccttctatccttggtgctaccatatttgttctggctcttgttacctcattatgggatataaaaatagcctgtcaactggtctttccattgccaggatctctctgttctaagccaccctgcctccagatcaatcttcctagagtaaaaccttcattgtatgacggtctagctcaaaattccttaatgattattaatcacctcttaaagtccccaattcttagactattagtagggtaaaattatttttgatttggagtcaaaaaattttggacgcaaattttggctactacacttaaccattatgtaacttcgaatttcggcttaatttttattcatcatttattcagtatctatttgtttaacaccttctgcatctcaggctctgtactaggtacttgggatacaatgatgagccaagcagaccttgtccttgctctcctggacctcacaacatggtgaacttgtctctattgctcatgatcataataatcctaagtacaggctgtgcttttttcccttgatacttgtagcttttggtttgtgctatgcagggtattgtaataccatttgcagtgccacaataatcagcatatatgtgttatcactcagccacattgcagcttcactgaagggcaggggctatgtcccatttctcatagcgcaagcacagtgccctgcacataccagctgctcagtgatttctgatgtggtttttgtagatccagggttagtctttggcagtcatgatgcctagtatgtttttagaggctccctttgtcctatcagaattatgctatttaaaaaaaagtcatacctatttagtttatattcattctaaggcctctcctttccaacctactaccctgcctataactattataaggagaactcacaatgtttataacttgtgcaccttaagttttaaatactgaataacaggcccattcatgtttcctcatagaaatactgtctatatgcatacaatgaaatgttaaaataatgttctttttactaaatagctttttgacttggtaatgaacaatatgttgtttttccctgagaagtagttctaggactttagttctgaagattatgttgtattttatacattttcagcctcctgtttttcagttcccagtgatcttacattaaacatttgtctgtctaaaacaataggttaactatagccaaattataaccataccattcctctccacacaaaatcctataaacagcatgtgatcatattgcttctagaatttatgattgttttcttccaaaaggaagctaaatttagcctagtaattctacatgcgctcaagaaaacaatgcctgctgtgatttctagaataaatgaatgtgaaccacagttcctttacttgactaacagagaaagtttaaatatcaacctagtcattaaccacagttattaaaccacgttaaacaaccagcaaggggttaagaaagaaagttgctatgttttttctttcattgctgaatgagtctaacttagttactgtatcaaccttaatacagaacattgtttgcatctcaatggttctctaaaattattcgttcatggcttgagttctaaaattaaactatgtggagtcatgtccaaccgcacaatgcatctttatgtgaaacttgctagagtttttgttttccttctatgtaaaagtccagttgggaagctttatttctgatagattaaatggtataggtctttcagttttctcttcatttctgacaactgaactgctctcgccttgaacctgttttggcagataaacctctcataatgaaggcccccgctgtgcttgcacctggcatcctcgtgctcctgtttaccttggtgcagaggagcaatggggagtgtaaagaggcactagcaaagtccgagatgaatgtgaatatgaagtatcagcttcccaacttcaccgcggaaacacccatccagaatgtcattctacatgagcatcacattttccttggtgccactaactacatttatgttttaaatgaggaagaccttcagaaggttgctgagtacaagactgggcctgtgctggaacacccagattgtttcccatgtcaggactgcagcagcaaagccaatttatcaggaggtgtttggaaagataacatcaacatggctctagttgtcgacacctactatgatgatcaactcattagctgtggcagcgtcaacagagggacctgccagcgacatgtctttccccacaatcatactgctgacatacagtcggaggttcactgcatattctccccacagatagaagagcccagccagtgtcctgactgtgtggtgagcgccctgggagccaaagtcctttcatctgtaaaggaccggttcatcaacttctttgtaggcaataccataaattcttcttatttcccagatcatccattgcattcgatatcagtgagaaggctaaaggaaacgaaagatggttttatgtttttgacggaccagtcctacattgatgttttacctgagttcagagattcttaccccattaagtatgtccatgcctttgaaagcaacaattttatttacttcttgacggtccaaagggaaactctagatgctcagacttttcacacaagaataatcaggttctgttccataaactctggattgcattcctacatggaaatgcctctggagtgtattctcacagaaaagagaaaaaagagatccacaaagaaggaagtgtttaatatacttcaggctgcgtatgtcagcaagcctggggcccagcttgctagacaaataggagccagcctgaatgatgacattcttttcggggtgttcgcacaaagcaagccagattctgccgaaccaatggatcgatctgccatgtgtgcattccctatcaaatatgtcaacgacttcttcaacaagatcgtcaacaaaaacaatgtgagatgtctccagcatttttacggacccaatcatgagcactgctttaatagggtaagtcacatcagttccccacttataaactgtgaggtataaattagaaataagtatcagtctcaaaaagaatatccagggcttcttttgtgctttgtaaatggtgtttatccaaaatagttgcagattttttccaagaaaattgaggaattgaatcttcatttacacctaaaattatatctttaaaatgtaaatggtaactaaaagaaaaatgtttttacaattcagatttgcatgttcgtgacatttcagattatattaaagttatttcccatataagcttttttatatttacacagattttatcagatttacacagattttatcagatttacacagatttttatcacagcagcaattcccataaaacataattattgacatttctatataatctctgcaacatttacaagatgttcaagctaatttgtatgccttaaagaattgttccttatgagattatattctctcactgatacacaactgattaatctatattcttgacattacttaaaggaacttaactttaaaaaacctcttctgaaatgctggtaaataaaacatttttaaatgagctcgtatacttctctaaataacctgtaagagtagagaggaaatgtttgttcccaagtccttcctttagagcttgactttaatcatggacttccttctggaaaagacttgtgtctaccaagttctagcttggcactttacctggttggtatttgttatttataagcataaatattttggttgatgattatttatacttatatgaaatggtattttcttaggagctgttagagatattcttggtgctgtgatttaaatatagtaacagctaccagctatacctggagatttatcctgctagtcagttgatcacctggtctgagtgtttattgtggctttgagtttcttgatctgggccagatttggaatacggacctgactatgaccatcattgaatgaacaaatagtatagcttttctaaagacagtttgactttggcatggtatgtttcacttactttaacaggtttcaatctaagatataaaggttataattgcaatcaggtagaacattaaacatgtcctcagtagcataaagtatataatttgctgaggggtaaaggcatatgaattcagagacatttggttgacttttgctgaaatgtctgggacacttctctagatggaaactatagttaactttttatgatgctaggaaaatacttccaagaaagtcagttcatcttttggtgaactaaaaacaaaacttccttcctctctcttccaaagtctatgaatatacataacataaatgcacatacattccaactaagacttatttccccctacatacatttaatatatgttgcaaagaagcaatagaattccttatgaagctcccccttttctttactagaaactacaaaagaatgaaaggaaacaaaatgattttcagaaacctgggattaggaaataaaaatataatattaatagcattacagagaagatatttttctgcatccagtaagttgattctgagacacaagttttaaaagagtctattaggaattcctccagggctcctagagcacatggatttgctatttaaatctttctttgttaaaaattaaaaagaagggtagggcaagaaaaaaattaaaaagagaattcataaaggtatattgatatctcattttttaaattttgtacatttcaatccttagatgtaaaaatacttatcaattctagaaattctcaaaacacatctgaattttatcctacccttttgacttttttagtgttccaagggagacaaacagacaggattagccaatgaaattcaggtcagttttatcgcccaggaaaaattcccaaaatgcactagccacacctgaaaccattatcactcccatcacaaaaattcttgcgggaaacaagatggaacttgccaacatagtcttcttacaaaggaagccaacttttacactggccaaattccatagacaaataccttcaaacctcctctatttatttgcctgtttatcttctctggttacaaagatcaaaattcttctgagactgagactacacatattctctctctccatataccccatccagacctcagattgttccaataatgagcatataatcatttcctagcttaatgccaaaatgaaggcacctagagccattcatcacacacaaaaaaaacaaaatgattacaagatcaaagctgtttagcaggactctcaagcaataagatgactccattttgtcttggcagatttacttggccagaaatcaagtgacccttttaataatttcttggaactgagtttttactttggcatcaagtttggtgaaaagacacacatattgtagttttgttattaacatctctaatacatttataaagggactcttgtggacaaggttaagaaagctgagctgcagcagtaactttctacttatgcttctgcccagtcctcagtgttgacacattgctgaaagagggatttcctggcactccaagagctctccaccatgtgcaaaaagtgtttctatcacaagatcagataatgggagtgccagggacgggccttttacattttaggggtccagcaggtgtaccaggcctgacttgcttgtttaggatcacatattttgttgcttttcccagtctcacatttcatgaaatatgtctatgcaaactcttcacatgcatcttctcatattgatgacatcacaaaagccctcttttgagtcatttgataattcccagtactcgtcatcttcacccataagctatttgtgcttcagaactctttgtctccacatatgatgctgtttctggaaacttatcccaagccacaaatgcccacttatagaataccagtgttgttgactatgtcagttgttctataagaatatattcttgatcctcacaatgtgtccattttttatgttgcttttgaaagtgattctaaagaatttgtttacagtgacttccaatattgagtactatgagattatacacccacaaataattactaaatctgtttaatatctttacctcctcctttacccattcatcaatcaacctctataagcatcctaaattagtattgattgaagttgttttaggctaatgcatattctctaaatagcatattattattcaaaataaaataattgagaaaattgtcccataatatggatggaacctttgtaaaggcccatatgtagggagaaaaaaccctcatctctatttgaggataagcagtagcaaaaatttcattaacttgtttaaaattaagtggaatttaattttaagactgtggaatctctaacagtcttttacatataagggattgattaatgtgacaatttcaggaaaaaaaggagaatcagtacacattggcccaatctcctacaaatgagaatcaatacagaataagagaattttttaaatccccaaatcagcaaagatcctgttccctaagttatagaatatttattaaaacaagtgaaatcgtacattttagaaaaaattttaatcaaagttgaaattagaaaagcattcttgaaatagctctcgcctctcagaaaatacaattagcacacaacactgtttttcttgaagttctattatcaaagttttgctctatagataagcatttgaaagacctgtagcaagtattttcgccaacatcttgatgaccttaatgaccaaagttggatcaagtgaaggggaaaagcatttggtgccagacacacctgggtggaagtcctggtttactgcataccaaccatgtgacttctgccacattacctgacttcttggaggctgagtctcattggtatcatgcagataacaatacctacttcacaggtttttgtgaaaatttgggataatatatatgaggtacctggcacaagatgactataaatttagcccgttgggagacagcatggactaatggaaagagactaaaatcagagatgttggttcaaatctgaaccccaccgtcttctacctggatggccatgaaagcattatttaaactctgaacccatcgtcctgcgtgcaggactatagtgtggacaagtatattaataacatctgtaaaaggtcccaacttggtccttggcacaaaataaatagcagctattattgtaaggaatacttgcgtaaagaaagacaaattcaaatgattggattattctctggaagaggcacattctggttctattgtttacaagtctttcacttccctctctaactgttatgagtgacctacctccataatggttaatttgtgttatgttgttcttaagattataatagttccaaaaaagagatggggtgaggagtggtggtagtttgagggggcagaggatggggagaaagacaattgaatcaaaactgtactatagtcaagttagaaggtataaattgttctccttcctctcactttcaatcctaactatccatgacctaagatattactcttatgtactttgtcatatcttgcattcaagaatttgcagataatgcagttttagaaaaagtcaacctcataggttgtttgtattgggcttccttgtttttaaatatcatttatactcaaattcaaagagtagccaactgcttcccaaaataaaggaaacttaaggtagtaattttccatctccgtttcacagaatgccaaagttaaagagtcactactcagagccatcaaaggaagaaagcaaagtgattagaacaattttaaaggaggacaaaaatcaaaacaagatgcaaacaaggaataataggaataggcagaaaaataaacatacagtgatgtttctttattatgattataaagatgatagatgagtaaaatcgagttacatttaagttgtaatggaagaaaataattgcagccttccatcaggaaaccacaaggaccgttattgatctgtcatcctcagggcatgtctcgtaatatttaataaaataaacaaagatttataacttttataggccatatatctataatctcccacaccacttgaactgtgaatgtggagtcaatgttacaaataacatccatgtgattatactggtttggcatgccttattccaacaatctagcactctcaagagaatgtattttgtattagggatgaaaaatgtgaagccagattatagagttttttacttattgtgctcaaaaatgagaaaatgttatccaatatgaaaaatgttgttaaggattcttcattcttaatattagacagcctttcaaacctaaatattaaatatcttggccatatgccaaatgtaatagctaccaaagcaaaatcttgcaagaaagaaaatccttgaggtataaagattcaatgtactttttaaaaaatgtaagtaaaaggttattaattttacatttcatttctttttctttcctagacactacttcatcctctcataggctcagggagtcactgcttcctaacttctttattttaattatccatgctactcattccacgaaaagtggcatattgcattattttattaaaagaaatttaaaattagtttctttccagaattttgtaacgccccctgagatcactgggcacacccttggggtgttagaaaacatgttacaaaatgaacctttaattccttttgctttttcccttcctcttgctgactgctctttaaaccattacatggctcattcacaagtctctctaccccaggaaagatgaaaaagcaaaggcatgatgtttttataacctaatagcaagagaacacagtgctgaagctgtcaccaaaactgtgggtaggttttacccgtgggttatattaattcatgatatgattgataatatctctcacttgtgtggggaatgaagcgttaactatgccgcatgcattttaaattaatttgacattattcttaatgtcctttcaagcaggtggcattataacctgtgtcttatttaggtagttgatttctacacggagattcatctgataaaactgatatcgcaaacgggaaggagtttgtacaaaatgaaataaatcttaaagttgatttttgtaaagcccaaatgttaattaaaatctttgaatccacaactctgatacatgatattttcattgacataaacatgattagcgatttctggaagcatgtgggatgctgcattgataaggatatgaacctccttgagtaataatgtatatttttactccgaatactgtttcacattttgggtgttacatccttacttcagacttctgccttatcagtggccatcccaccctatgttcttatctcctcagtctaaaaagaaaaatggggacccatcagaatttggatagaagaccctccaggaatttctgccactgcttattcatgggttggcacagacactgattcagtgggcacacagagttcagaatgattcagagcccagatatgtgccctaagtcacatctccagcgtccagggaggactgtaaagtgctcgttatcaggaaaatgaaaccaagggctcagctactcctgaagtcattaaaactccttcccttgatttttttttttttttttttaaatagtatatgtggtaaccgaatctaggatcctggatacattccagtctgctaattacatatttttttctaactaaaatgttccaggcaggttcatttgcatgtgaattacttgctgagccatgttgacttcctattctaaaagcctcactctgccttgggaagcagtttactgcacttcaccctagacctagtctaatgttggagcagacaaagtgtagctacccatatatacttcaaaaatattttccagtctccccacaagaggaaagaaaaatgtctagcaattgcatgctaatttagaccaaagctttgttttaaccattcttggtgatcacaaatggggaaaaatgatttatgaacagtataactataaaacaaacaaaaaaaaaccattgtgaattcagagtgaagtctgacttcatttgtcttatttgggtaaatcagcaaaatgttcatcagtcagaggacattaaaatggtagatgatacttcaaatcgtgccctagataaaaggagagaattaaggttagttttgatttgtaaaccattctcttcgaaggctgattttataaaaattaagtttgctgagtcatcatctcaaaatatatagttattcatgattagttaaaatttgtgtctgtgtatcaaagaagtaaatttgtatgatattaaattttctaacaatgttttaaattttaaaatgtccgattaacacttgcatctagcaaccagtctactaactaaactataggtgaagtcatgctcaggaaatggggaaaatgcacagattaaattggtctgttagctctgagtgaatcaatagtatttagtgctaatgcactaaggagattacaagcactaatgcagtagcagtcaatagcgaaaactaatatctctaaaaaatatcttgacaataaaatgtgcaatattttccatttatcttaagctaattacattacctgcttgttctttcatcttattagtttaagccaagtgctagaagcctaaccattttatttagtgcataaaagggccaaaaccttgtaatcattgttttcagcaggagacagaggaaaggattaattcatgtaaccaagattcaaccagaaattcaacagatatttatttagtctctaaacctgatagtattacaatggagaatgagctagactgtacctgtcttcaacaagcagatagactagtgaagatgacagtaaacattcagtcacaccagtgaacaaatacatcatgataatttatgaaatgtgctgtgagggaaataaacatctgtgaatgcaaatgagagggaatatctaaatttggtagttgagtcacaaaaggctgtcctgaggaggtgaaagctaacctttatataaagcttaaaactttaaaaaagcaatacgtctttagtacacaggcaaatatataaactaaatatataaactaatagtcattacttatttcacaagctttacatcttaactacaagctgctacattaaatcagctttcttaagtggtttgtggtcattagtgcatactatcttacacttagaaaaacattgcaagaagtagtacaatgctggagaatttaactttttaaaacatttcctgccttaaaataaacagcagtaaatgtgtttaaacattcttttgatttctaaatgaattaagttactttttattatgtggttcttcttcatatgaagaaaataatatgtagattactagaagctaagaacatactttagatcctgctcacactcactgcctttcctggcctgtcaccttaatcagcttctttgaaaatcactgtttcttacataggccaggttgtttcttccttgtttccctcttcttccttctatggccaacccttgggaccccgtttgtcagaagaacatgttcctctttggggaggaggggattgtccttttaccaataagttttatgaccaagagaaacataagaatctgagaacacacaaaataagctcttttgaaactatcaaaattataaacattaatagaattcaagggaatgtgatgctgaagtgatcccaagtcacattgtctttctgcctctgtgcactgtactctgcacaattgcatccatttttagaccatttccttctcatgagaatcatgtgcatggagggccaaaggagagacaagtgctcacaaggatatcatgagcacttatgaatgtacaaatgagtgctctccagtcagtgccatctttatattgttccggtttataggcaatgccttcatctttacctacagacacatgttgcctttctgtttcattttaatcctgttcatctatacatatttaatcacacaaatatctaaataagtttatgtcttgtagggaaggcactttgtcatgcttctttgtacctaagcatatgctttgcaaatcataaacaatagtgttgattttatttgatataaaaacttggattctcaaaagaaatctatgtgttcacacgataaacagagaccatctgaattgccaaagtatgactgaatcataagcagtattgttttagtcatctttacagaccaggaagatttgaaatacaggtgtaaaaagatgtgtgaggcatcaaaagaaatattcacctttctttgtgttcattttttttatttttgcttggccgagaaagaaggggtgttttccaagggaataggaggcttcagggcttattcctgtgcctacaagtcagagaggtcactggcttgccccttcctgaaggctgtaattacaggcagaggactatttattttcccgtaaggcgaccagaatcttgagtgtaaaaaactgtttacaagagtacactgtgtataggggttacacacaacctcaggaaaaataataggaaagtgagactatttttcttcatgtattcaataatatgagaaggtccaagactctggaaatgttctaaagtacaataatagagatgaatatgaggtcaaattaggtgatcctggggcttaaggaactgaattaaatgaataaagaagaggaatttctaatagggcataatctaactgataatttgttaaatgtaaacttatttgtggctccaacatcatggtaaacaagaatgaataaatgtattagtaagagtaattgagaagtatttctaatgtgaaaaacaccaattacattgggtttatctggcgccaatgtggaaataaatgagcaatatttcttactctcaactaaacttactctcactttcagaactgttataggaaaggtattgattcaagtagagttgggcatgcaaagcacaagatcaattctgttactggcctgatattaaggatattagtcagtgtttgaaaaaatgatttgtaatatataagtagtagtttaacaaagtaggtaaaacttgtaattaatttcaaaaggtcaaagcagagattattgacatgtacaaagaggacccgctttatatgtgcctgctttgaaaagtaataccgtagtatggtaaattgtgactaattctgagattttctgtctagattctttttaaaaccaaatgcttaagaaaaaaacatgagacatgagtagcaattacattttttaggctgagtaggtagcataattgcctcatgcctgcctcctgtctccatttgtttttagtagattttgcacagaaaaacatgttgacctcggtactgaaattttggagttcactatttgcggcacagttacagatcacagaaaaaaatgtacaacaggacttcaccacacctaacaaaagaaagttttcttattaaaaaaaaaaccctccaaattattgtgagatctagggtaaccatggtgttaactatatgctatttgatatcttataaccctggtgataagataacaatccaattgaatgcagatgaactcatgaaaaaagaaggattatgaaatatttggaaagtaaacacctaaattttcataagtaaatattaattatttgtgtgatctttagatatgaaagcttcccctgcatgcacttggctcttggaaccagctgttaaaactcccagcaccttagttaataccctgtatgctggtggttcaagaactagttaagaaacagtcacattttctattttcactgccaatgtataataaaatctctgttccagtgaatggctggccaattattttaataacgatgttggcatggcttcattttacctttcttgctattagcaaagctttccttttgtactctgaagtacgggtaaatcacaaattaaactgagctgttgtttgtttaatgctgtgtttcctgctaaccttattcttgtctatcaacctgaacgtagttccccagtggctcagaaaaccctcaattgggattaagtaatagtttacacaaccttgctcagtcattaacctgtgttgactttctcattcttgtgttccagcctcatttaagagtttcttaagcactctatccagttgctggtttggtgacaactaacaatacctatttaatcaagaaatttaatatttccaaggaatcatttatcgtatctcagacttcttcattaacataatctaattcagtcttgtattccttcttcaaaataaagcctggtttcattcatagtaaatatgaagcttaaaaatttttacttcttttcttctctatacacacaaagcagaaagagaaaattgtatattatcattccagacaggtttttttttttgtttagtgtattgacattgatgccaataagataaaactagacctcagtggctcctcctcaactccacccaatctatttgtctccaaagtgctgttggagtaagtaatctttgttaagagcaaacctatttgtatatctgatgataatctgagggataataatatgatatttaaggagtttctgtccttggccctgactatttcctggtcctccttcacgcccagtgatgtgctggtaaatgttaaactctggggggaggggcagcagaagcccctaatttgtagcatttgccaatttctatggtgtaaatatcccactgagccagtttcaaggtaccactgaaacagcgttagtcactgaacaacaatgaggaagagatgtacacacttggctctgtgaactgttatgagatggttcaagcacagcactgccaccctgtcctacacgcaacctgtcattcttgtagttcccagaatccatcagcctccctcacaaccctgccttaacacgtgtagcttggtccacttcagattccctttaacactcattttgtcaagtgaacactttttccctattctttaaaacttccatgctggcattttccttccccaggacatttttccctagccttcaactcatcccctgccccccatattctggatttgttgcgtttcctgagcacaccagtagcactctgcttatttctaccatgtctcttatcacactccgtggtaatgtgtccaacagttccatcgttagccccctgaggggatgaactatgccatttatctccacagtcccagcacctaatacaatagcttgaacaatatatacatttatcggatgagcaaagaagtatgacagagccctgtatgtaaaatatattactataaatagaatgctgattcataaaaataattatttagataaaacagtttttccgtctctcccctaaatccctaaaaactaatttatagaattggggagttttcaagagctaaattagcactggagaaaaactggggagttttactcactattacctatgcccctcccgtcccccccacacacaccctccttcattcaccagtctgcaatgaagattgatcaaagaacaaagaagaagaaaaatgaaagaaaaaggaaagattaagatagggagggtgaatagataggaattccagagttttgtaatcgaaatttggaactcagaattaaagtcattaaaaggagaaagagggaatactttctctgctcccgtaaggttttctcaagcctttcaacagcactcaccctttgagcgggtgataccatctgtaagagggactttacgcaatgctttagtgggcgtggcttgagcagtgacaccagtagagatacccccttgaaactttcatttgaagtccacagattttcactattggtcaccaatccatgatttcaagttgaaaatgatatatgggttaaggaaaagaggccgggcgcggtggctcacgcctgtaatcccagcactttgggaggccgaggtgggcggatcacgaggtcaggagatcgagaccatcccggctaaaacggtgaaaccccgtctctactaaaaatacaaaaaattagccgggggtaatggcgggcgcctgtagtcccagctacttgggaggctgaggcaggagaatggcgtgaacccgggaggcggagcttgcagtgagccgagatcccgccactgcactccagcctgggcgacagagcgagactccgtctcaaaaaaaaaaaaaaaaggaaaagaagttaagggcaaaggtctttatcaacaccatccttcctgtggccacaggatcgtaatcccagtggcaacattcaaaggcaccaagtacgtgcttggtacagagagaagctttcctgagcttggccttggtgtagatgcagtgagaactgagtaagggcctctggcagggaccttggctgctgagaaggggagcccacagatggaggtttctgatcaacaggtcctatcagaaacaaggggagcagataagtaaagagtctcactccacggtggcaagatggaaaggagggataagaggtcatgacagttggattaatggcaggctagaatatagtcatgggcttgaacgatatattgggacacaattgaaggactcttgtttcatccatcgttcatctctcctggccctctgtgaagacatttatcacctgtttctattgaatgtgacactgttaggcacataaacagaccatggctcttaccacctccaagaagaactacttctgttttatttgttagtgcagggtaattggtgttgtgtcttctgaaaatctcttatacttctatgagtaagtgcattgaaattgtttctgttaactaagtagaggaaagcagaaaacctctttgcactaagcattaaaaccttcctaacttggaacaattttctttatgaatcactctgtcactcctggctatgattgaagtgcagtatgaaggctgctaaccaaaaacacatggacacagtctgtttcagatctgattcaccttaggaaatgatgataaagaagcaaaagttttaacacttagaattccaaggtccatatcattgtagaattgattcttttgaattgtggtggtacctcaagagaaaggatttatttatttcatttatatttaaatgcgtttgtatacatatgtatataaacccatatacacatatacataaaatatattctgctccaagtatttatctctcttttctctttactaatccagcttccattaagaactggctcaacttcgacctctgccatgagccttctccagctgtttaagcccacacagatcttatttttttcctagtcttagaggatttactgccagtacagtgttttcagaatgtaactatcaactgagttcttatactttgcatcagttagctattgtacgtgtcaatcttttgtctccctatgtagaggctagacccaaggtagaagcatttgccaggattgacaaacgatagcctgtttttatattctcaacaagtgaaaacttattttgtttatatttttttccctttttatacagttaaacactcacatgcacgcacacacacacacacacacacacacacacacaggccacagggaccctatggccctcaaagactagcatatattctatctagccctttcccaaaaaacatgtgccaacccctgcattagagaatagtgtaaaataatagtggacagataacaggtccacaaattttggagagccatggatgaccttacttatgaacttaagtaattctcttcaataggtgtgagtgtttccattttacagatgatgaaattgaggctcattgatctaaacaattggattttgtcttcataggcattatgagggcttactagaccaacaatagtgataataataactgtttagttgcacaaggcagggatttatgtcttttttatttgctgccatatccttcagcacctagaacagtctgtcacatggtatggtattatattcattttccagagctcccataacaaattaccacaaactgggtggctgaaaacaacagaaatttatcctcacatggttctggaggccagatgtctgaaatcaaggcatcagccagggccatgctccctctggaggctctagggaggactccttccttgcctcttgcaattctggtgtcccaggcatcttaggttgtggcagctttactcccctctctgcctccatctttatgtggcagtccaccatgtctctctgtgtcccctcttcttataaggacaacagtcattgaattcagggcactcactaaatccaggatgatttcatctcaagatccttaactaatcacatatcaaagagcctatttccaaataaggtcacgatctgactttccaggtggacatgaattttgggaagacattattcggcctactgtaggtcttctaaatgaagtgaccatttaatatgtttctggcactggattcatttcatttaagcctcaaaacaaatctgttatgtagatatgtgttttcccactttacaagtgaagaactgaggtttagagatctaggaatcctaaagctgcacagccaggaagggcagggccacccctgacccaagttctctgctaggttagcatggttgtcacaggacaagctgagaaggtatttagggagcattacactaaaaagttgtagaagtcggcttaaggaagaagattctaaaatcaaaggaatcagattgtaggaggccatgtaggcaatttcctttaattcaatagaagagagtataagaatcagccaggcatggtggctcatgcctgtaatcctaacactttgggaggtcgaggtggaaggattgctagagcctgtgaattcaagaccagcctgggcaacatggcaaaatcccatctctacaaagaaatacaaaaattagccaggtattgtggcacatgcctgtagtcccagctactctggatgctgaggagggaggatctcttgagcccagaagggaagaggttgcagtgagccaagattgtgccactgcactgccgcctgggtgacagagccagagcctttcaagcaagcaagcaagagggaaggagggagagagggagagagagagagagagagagagagagagagagagagagagagagagagagagaaaagaaacggagagagagggagggagggaaggaaggagggaaaaagagagaaagaaagagaaatatgaaagaaagaaagagtaaggaaggaaagaaagaaggaaagaaagaaaaagaaaagaaagaaagagaaagaaagaaagaaagaaagaaagaaagaaagaaagaaagaaagaaagaaagaaagaaagaaagaaagaagatatgaacaataaaggaaagactcaaagatggttcagatctcaaacttacggagagggtagctattgatgcattgagaaataggaagctggaagaggaaatcagtttggagagaaaagtgatggctttgaacatcatcaatggcgtattcaaacatagcttgaaggcatttgcagagacagggctggtcctcggaagagatggcaacggggtgtgtagagttaggtcatcaccacgaggctgtgagggcagagccacagtagcttccatcaccttgtgaatcaccagtgctcagcccgtggctggctggccggatgcctgcttatgctgtgctcccggctgtctggctgcacacacaaccgcagagcatgccctctctggctagggcagaaagaaattgaagcctcttaaattttgccccccccagctttgctcccttgctaggacttccaggccatgactattgaagccatagggcaggattacttcctcaagaggcgttagtggaaacagatgtgttgaggaagcctctttcttttcaactgtgccctgagcacatcagatggagtcctcttcatagcacaaaacaacttggtcagattcttagggtttgaccacagcaccctaacagcctggccgtgcattaaggaccccaaagagaaggatctgctttgccagagagctgactcttctgtattttacagacaattctgaattcaatgtcaacatcttagacatctcagtacagacagtaaagagttaaaatatgtctataagaaacagcgccagaccctgaaattgaaagctctgtgcctccctgcgtgcagtcagttccacactgtcctctctcccagttctatttaataaaaaaaacacatgagtgaaatttagggaaataagaattcctgaaattaaagcaattaagttttcagtcaactgtatgaaaagctctagacaaagaggtactttctatttcaaaatatgtatttcccagaaaaccattaccatatctagctagaatttctacaaagaatgattatgaataaagtatatattcaaatgcttctggtaatttagtcatggtcaaagaggagagaaaggtgatacaagtgaactggcaaagattttacaagatagtacatttttaaaaattttatttgcaagactgatttaaattatctatagatgagctaaatctgtcctatagatcaattaaatgaatcactattttaaatatatcacattcttaattacactgaattaaatataattacatattcactgcatacatcataatgttaattaggggaaacattttgaatcaaatatattgagatatatagcacttcaattttctttttataaaaaaagctatatgactaagtcaggtaaaaagaatctggcaagtactcatagaaagctaaaggaagactagattaattgatgtatcacatcaaggcttacaaattgtagaggaattcctattctttaactctatgacagtatataagactttgggctaaggaagcaagtttgcaacaagtttttaaaaaataataaaacaggaggcagggcacggtggctcacacctgtaatcccagcactttgggaagccgagacaggtggatcacaaggtcaggggttcaagaccaacctggccaaaatggtgaaacccagtctctaataaaaatacaaaaaagttagccagatatggtggcgggcacctgtagtctcagctattcaggaggctgaagcagggaattgcttgaacccaggaggcggaggttgtagtgagccgagatcacgccactgcactccagcctcggcgacagagctagactccatctcaaaataaataaataaataaaaattttaaaaaataaataaaataaataataaaacacattgtttaccattgtttctcagagacatacgattattttagaagtggataagccttttttttttatactttaagttttaggatacatgtgcacattgtgcaggttagttacatatgtatacatgtgccatgctggtgtgctgcacccactaactcatcatctagcattaggtatatctcccaatgctatccctcccccctccccccaccccaccacagtccccagagtgtgatattccccttcctgtgttcatgtgatctcattgttcaattcccacctatgagtgagaatatgcggtgtttggttttttgttcttgcaatagtttactgagaatgatgatttccaatttcatccatgtccctacaaaggacgtgaactcatcattttttatggctgcatagtattccatggtgtatatgtgccacattttcttaatccagtctatcattgttggacatttgggttggttccaagtctttgctattgtgaataatgtcgcaataaacatacgtgtgcatgtgtctttatagcagcatgatttatagtcctttgggtatatacccagtaatgggatggctgggtcaaatggtatttctagttctagatccctgaggaatcgccacactgacttccacaatggttgaactagtttacagtcccaccaacagtgtaaaagtgttcctatttctccacatcctctccagcacctgttgtttcctgactttttaatgattgccattctaactggtgtgagatggtatctcattgtggttttgatttgcatttctctgatggccagtgatgatgagcattttttcatgtgttttttggctgcataaatgtcttcttttgagaagtgtctgttcatatccttcgcccactttttgatggggttgtttttttcttgtaaatttgtttgagttcattgtagattctggatattagccctttgtcagatgagtaggttgcaaaaattttctcccattttgtaggttgcctattcactctgatgatagtttcttttgctgtgcagaagctctttagtttaattagatcccatttgtcaattttggcttttgttgccattgcttttggtgttttggacatgaagtccttgcccatgcctatgtcctgaatggtaatacctaggttttcttctagggtttttatggttttaggtctaacgtttaagtctttaatccatcttgaataaatttttgtataaggtgtaaggaagggatccagtttcagctttctccatatggctagccagttttcccagcaccatttattaaatagggaatcctttccccattgcttgtttttctcaggtttgtcaaagatcagatagttgtagatatgcagcgttatttctgagggctctgttctgttccattgatctatatctctgttttggtaccagtaccatgctgttttggttactgtagccttgtagtatagtttgaagtcaggtagcgtgatgcctccagctttgttcttttggctcaggattgacttggcgatgcgggctcttttttggttccatatgaactttaaagtagttttttccaattctgtgaagaaagtcattggtagctttatggggatggcattgaatctataaattaccttgggcagtatggccattttcacgatatggattcttcctacccatgagcatgttcttccatttgtttgtatcctcttttatttccttgagcagtggtttgtagttctccttgaagaggtccttcacatcccttgtaagttggattcctaggtattttattctctttgaagcaattgtgaatgggagttcactcatgatttggctctctgtttgtctgttattggtgtataagaatgcttgtgatttttgtacattgattttgtatcctgagactttgctgaagttgcttatcagcttaaggagattttgggctgagacaatggggttttctagatatacaatcatgtcgtctgcaaacagggacaatttgacttccacttttcctaattgaataccctttatttccttctcctgcctgattgccctggccagaacttccaacactatgttgaataggagtggtgagagagggcatccctgtcttgtgccagttttcaaagggaatgcttccagtttttgcccattcagtatgatattggctgtgggtttgtcatagatagctcttattattttgaaatacgtcccatcaatacctaatttattgagagtttttaacatgaagggttgttgaattttgtcaaaggctttttctgcatctattgagataatcatgtggtttttgtctttggctctgtttatatgctggattacatttattgatttgcgtatattgaaccagccttgcatcccagggatgaagcccacttgatcatggtggataagctttttgatgtgctgctggattcgttttgccagtattttattgaggatttttgcatcaatgttcatcaaggatattggtctaaaattctcttttttggttgtgtctctgcccagctttggtatcagaatgatgctggcctcataaaatgagttagggaggattctctctttttctattgattggaatagtttcagaaggaatggtaccagttcctccttgcacctctgatagaattcggctgtgaatccatctggtcctggactctttttggttggtaaactattgattattgccacaatttcagctcctgttattggtctattcacagattctacttcttcctggtttagtcttgggagagtgtatgtgtcgaggaatttatccatttcttctagattttctagtttatttgcgtagaagtgtttgtagtattctctgatggtagtttgtatttctgtgggattggtggtgatatcccctttatcattttttattgtgtctatttgattcttctctcttttcttctttattagtcttgctagcggtctatcaattttgttgatcctttcaaaaaaccagctcctggattcattaattttttgaagggttttttgtgtctctatttcctcagttctgctctgatttagttatttcttgccttctgctagcttttgaatgtgtttgctcttgcttttctagttcttttaattgtgatgttagggtgtcaattttggaactttcctgctttctcttgtgggcatttagtgctataaatttccctctccacactgctttgaatgcgtcccagagattctggtatgttgtgtctttgttctcgttggtttcaaagaacatctttatttctgccttcatttcgttatgtatccagtagtcattcaggagcaggttgttcagtttccatgtagttgagcggttttgagtgagattcttaatcctgagttctagtttgattgtgctgtggtctgagagatagtttgttataatctctgttctcttacatttgctgaggagagctttacttccaagtatgtggtcaattttggaataggtgtggtgtggtgctgaaaaaaatgtatattctgttgatttggggtggagagttctgtagatgtctattaggtcctcttggtgcagagctgagttcaattcctgggtatccttgttgactttctgtctcgttgatctgtctaatgttgacagtggggtgttaaagtctcccattattaatgtgtgggagtctaagtctctttgtaggtcactcaggacttgctttatgaatctgggtactcctgtattgggtgcatatatatttaggatagttagctcttcttgttgaattgatccctttaccattatgtaatggccttgtctcttttgatctttgttggtttaaagtctgttttatcagagactaggattgcaacccctgcctttttttgttttccatttgcttggtagctcttcctccatccttttattttgagcctatgtgtgtctctgcacgtgagatgggtttcctgaatacagcacactgatgggtcttgactctttatccaatttgccagtctgtgtgttttaattggagcatttagtccatttacatttaaagttaatattgttatgtgtgaatttgatcctgtcattatgatgttagctggttattttgctcgttagttgatgcagtttcttcctagtctcaatggtctttacattttggcatgattttgcagcggctggtaccggttgttcctttccatgtttagcgcttccttcaggagctcttttagggcaggcctggtggtgacaaaatctctcagcatttgcttgtctgtaaagtattttatttctccttcacttatgaagcttagtttggctggatatgaaattctgggttgaaaattcttttctttaagaatatggaatattggcccccactctcttctggcttgtagggtttctgccaagagatccgctgttagtctgatgggcttccctttgagggtaacccgacctttctctctggctgcccttaacattttttccttcatttcaactttggtgaatctgacaattatgtgtcttggagttgctcttctcaaggagtatctttgtggtgttctctgtatttcctgaatctgaacgttggcctgccttgctagattggggaagttctcctggataatatcctgcagagtgttttccaacttggttccattctccccatcactttcaggtacaccaatcagacgtagatttggtcttttcacatagtcccatatttcttggaggctttgctcatttctttttattcttttttctctaaacttcccttctctcttcatttcattcatttcatcttccattgctgataccctttcttccagttgatcgcatcggctcctgaggcttctgcattcttcacgtagttctcgagccttggttttcagctccatcagctcctttaagcacttctctgtattggttattctagttatacattcttctaaatttttttcaaagttttcaacttcttttcctttggtttgaatgtcctcccgtagctcagagtaatttgatcatctgaagccttcttctctcagctcgccaaagtcattctccatccagctttgttccgttgctggtgaggaactgcgttcctttggaggaggagaggcgctctgcgttttagagtttccagtttttctgttctgtttttttccccatctttgtggttttatctacttttggtctttgatgatggtgatgtacagatgggtttttggtgtggatgtcctttctgtttgttagttttccttctaacagacaggaccctcagctgcaagtctgttggagtaccctgccgtgtgaggtgtcagtgtgcccctgctggggggtgcctcccagttaggctgctcgggggtcaggggtcagggacccacttgaggaggcagtctgcccattctcagatctccagctgcatgctgggagaaccactgctctcttcaaagctgtcagacagggacatttaagtctgcagaggttactgctgtctttttgtttgtctgtgccctgccccgagaggtggagcctacagaggcaggcaggcctccttgagctctggtgggctccacccagttctagcttccaggctgctttgtttacctaagcaagcctgggcaatggcgggtgcccctcccccagcctcgctgccgccttgcggtttgatctcagactgctgtgctagcaatcagcgggactccgtgggcgtaggaccctccgagccaggtgagggatataatctcgtggtgcgccgttttttaagccggtccgaaaagcgcaatattcgggtgggagtgacccgattttccaggtgcgtctgtcacccctttctttgatccctgaccccttgtgcttcccaagtgaggcaatgcctcgccctgcttcggctcgcgcacggtgcacgcacccactgacctgcgcccactgtctggcactccctagtgagatgaacccagtacctcagatggaaatgcagaaatcacccgtcttctgcgtcgctcacgctgggagctgtagaccggagctgttcctattcggccatcttggctccgtggataagccttaaaaggctcaatactttttaaaaatttcctataaaatccagaatctatctagatttttgagcagcctgtagtggttggaggaccatgattgtttactcatttggtcacctaaacatcccaagcaatgatttgttctgacagcagactgataacagttttttttactccttggaatcggaaaaaaaatcagcaagggaagcttttggaagccacccggtagagctggaagagaatttcgaaatcaattcgctcaacctctccctttacaggcagaaaatgtgctagattggaggtgaagaccctggagccagagagcctaggcttagtcctagccctgcactgaaggtaatgtgaacactcagtgcctcagtttccttctaggcttcttgttctgagattccatgaattaatatttgtaaaatgcttagaactgtgtctaacacattgtaaacactaggaacaaatgctaaggtcatgcaactcatcaatgcctccctggggtagaaccagccttggcccatgggcatgctcattcttcttttagacaaggctcttaggcatccctagagtgtgggttggccttcctatgcctgtacgtaagaagtatgatgtaatgtaaggaatataggattcaaaatcaacaattaggattcaaatgctaatatttattgactcaactctctgaatcttagtttcttcatctgtaaaattataatgatcataacaaacccaagtcacagacttgttcagaggagcaaatgagataatgtactttgaaaaccataatctactctgcaaatgttatgtaacattataattgtgagttcagcaaagccatgagaatgtttcaaaactgtttaggacatcaagaagttggggtggggaaaattcttaataggttttctccatatcctcattttccatttattcattgttttaaaatttatttttcttatgatatacatatatatatatatatatatacacacacacaaaagaattatgtacggtcctgcattgcttgcattctgagaaatgcatgaataggcaattttgtcattgtacaaacatcatagagtgtacttatactaacctaggtgatatagcctactacacacctaggctgtatggtatgaccttttgctcctaggcaacaaacctgtacagcatgttactctgctgaatactgtaggcaattgtaacacaatggtaagtatttgtgtatctaaatatatctaaagatataaatatgtctttataagtatacaaatatatctttaaatatactagtatatatttatagatacaaatgtataaatatatctatagatgtactagtatatatatttatagactagaaaaggcacagtacaaatatgatattattagcggggtgtggtaattcatgcctgtaatcccagcactttgggaggctaaggtgggagaattgcttgagccctggagtttgaggttacagtgagctacgaacacatcactgcactccagcatgggtgacagggggataccctgtctctcaaaaaagaaactaaaacaataagatagaatcttatgggaccaccataatatattcagtctatcactgattgaaatgtcattatgcagcacatgactatatatatgtatatatatatatatatatatatatatatatatatgggatataaaacaaatactcatatctctaccaccaggctcaaaaagggaatattacctttgaagtcccctgaatatcccatcctagcaatattcctccccctcctggaaaagtgggtaaacaacaattgtaagtcatgtgtttgtctttcctttgcctgtagttgcgctacacaggtgtgtgcccagaaaatattctttattggatgcatggggtttccttcttgactcagagatctcaagctatacggtatcttcctgcagccttatagtgtccaccttattctttgtcactatttccctttcccagccaataaagcacattacctctgtcattcaaatgaactcgtaaagagagattttagaaaagagctggttcacctcaggttcacctgagcaaggaatgggtgtcagtgactgtggaaagtggagcacagctgccagagcagtgcaaggacccaagaaatgggagggtcttgactcgggataaccactctgagattcattggatgtcctagattgtcaccttgccttacaccttaagggagaaaaggataaaaagataaggcagatgtgaaagctatactaaggagcttagacttttcctgcaggcctttgggaagcaactgaagctttgaagaagggaatgacagcttgagactgcttcaaggcagaagagataggagaccagaaggccagtgaggaagcacttaggctgggccaggggtacaggtgtggctggaagggctgcccagaagcaccactgtggaccaggctgagcaggactgagtgactggttagatataggaaatgccagagaaagagaaggtggtgatgactgaaatttcagagttacctaaatgcaagcatggtatgttcataaccaaaataggtagcaaggagagctaggtttgagagccaagctgattagtacagaatgcgagtggttatctctgctgtttccagaaaataaagattaatttcagccttaaagtcagggacttaaatgagatgatctcgaaagccctttccatttttgtaattgtgcaatcctcagaacgttgcccagaatagtaagcagaagcaaaagaaattcaggagtttgaacataagagagagctgttctctgatgcctgctccaatgggaactgggcactgtgactgagccctcggctcactgagtctcctcctgaggagtgtgataaaacctcacagggctgctgtgggtcttattatacatgaaaatacccacctcagtgcctggcacattctgggtgcaggaaaaagtttgatttcctccctcccttccttccttccttcctttttcctccctttgttaccataggagagagtcaggctggttccctgcgggtgctggtgtgaaacctgctctttagactcttctgcagttccccaaagcagctactgtcccagagaactgctttctgccagcaatgctcagttttaccctaagacacgataactcctggctttgagggaagcacaggtagcaaggggacccctgacagcaaatgtgtagttgttcttccagctaggccccagccccaccttaaatgccacatccaggcactgtgtctacagtgctgagataaagcaaccccgtcttttccacacaaatgagcagcaaacatatttgctgattatctttgagggacataatgaatcagactgagatttagtcatatttgcacaatgctttacatctgagatactgaaagcttaatccaaggtttccctgttagttgaagtcctactgttagggctcaaagacagggtgcagctctgtaagccagtccctgatgccttgatcccaatcattgagtttatcaggattctccataggaagacacaaggagcacctctgctgcagcaaatgctggagtgttagtttttcctagaggctagtgcctcaacacctcttctgcagatctcagctatggagaaaatgaaaaagaaaaaggttagagtctcctggcttatgaaatttgaatgccacttgaacctgacatatttattttttagctctaaatcacacaagatcaagaagttctgcagatcctattccaacattgtgcaatgtctctatatttacaaattttatttgatggggggggcaatagagacataatttaatcctattagttcttgaggagatactatttagagatctcactaattcctgtcctgaaggagaagacttgaagtgtgcaatataaatattgcattaactctaatacagagttctacatttacgccttacatgtgtgcaaacaggtgcacagaggctaaagttctggttgtattgctctccctccatttacaaaagatcagtgagttcctgcttgcagattctctgaggagacccttagtttcatctcctcttcattcttctgctggcctgattcagcaagaccaaccacaaagcaaactgagtaggcaaatgggctttatctctggtgactttgcagatgcactaatttttcagcaggctgtcattaaatgcctactgggtgctaggcataatacagggtcctggggataaaagatgataagacaattcctgtcctcttgttgatagaaggcaggtagtttgtggtcaaagactctcattcacacccaccagattgtttttatatcccagtgaatccattatgtctctggcagcaccacacaccaggtcaagtttgaggctttaaagttcccaggatgtcacctagacttagagatgaagaaacactaacaaaagaagaaacaagacaaccacaaaaacctgagcctgaagagctgccacctctataatggaatatttcaaatggccttagatttaaaattggtctttgctcctttaagcagattcccttagctctggctatctctgcaaaatggatgattgatcaccaatagaaacttaattatcaattaatcggttgctatcgaattgctggtacatctcagttatctgctactcctcagagtaatccatagtactttagtgaagaaatacttctaattaaacagggaaatagcacttgctaatatatcaaagtaaatgactagacctaaaacattagtattaattacaagagtcagtgggtttagcatctctaagtttctatttgctaatttattgccactgaaaatgaagaaatcgttgttgatatataaaatagagcattttaggtggtttttaatcataaaagtcagtagatgtaaaaactctggattgcatgtggcagacatttgaccttaaggaataaggtcgctatacagaaggataactaaacttttatttgtttgttcttaaacaataaaatgatttgaaatatactttgatcattttgtgattattatcatatgggatgataatagagaatttcttacttcctaatcattttcctacacttatagttacatacaaagatgtaatgaaatttgctctccttttcttccaaggtatacatcattttccttaatactttctcccgtccccatcgtctaccccagatttaccaattcccagctatctccttaggacagtcaagaaccaaatactcccatttgtcccttataaactcttttaacttccccaatttctggaaaaacaaaaagctttaataatatagttttatatctccatactcatcccccatctacttataattgattcacttgttcattcattcaattaatatttactaaacatctactatgcatgatagttaatcaactactggcaataccatggtgaacgagtagggtccctgatcgcagcgagctgcttgggagaagtttcacattatcttataaatcacgcaagcaaatgttatgttgcagcttgtaactatgttacagctatgctatgggtacacaggtaaatgatattatgagaatctacactagaagcatttgacttagatagtggggtcagggcaggcctcctgaagaaatggtgataagctaagatctgaaggagatgtaggagttaacaaggtgaatgaaggtggaaggagcatttcaagccgggaaatagcatctgcagaggcccttaatgggagaacacgtgacatatttggagcgctgaaagaaggcctgctcgctggagcactaagaacacagatctggagaagttgggcaggggccggatgatgggaagggagccatacagtccatgttaaaaaaatgttgttctttatcctaacagcaatggggaagcattgagtgttttaaatagagagggatatggtcagatttgtgtttgaaaaagaaaatcctgctgcagtgtgaagaacagatcacctggcaagggtaacagtggatgtggtgggtctagttaagaagccgccgcagtagtccaggaaggaatgaggtggctaggatgaaaattgggaggaagggcatgaaggagaagactggatgggtctaggaggcatttagaaatgaaattgttgggaattggtgatggactgtatatgggggcggagggagagggaggaattggagatgacacttagatttctgacttgtgcacctggaggaatggtagagccattcactgaggtgtgtagtgtcctaaggtcaggcaggaggaagattgtggtttctaggatgggcatgttgttgaatctgaggtctctgagacatgtgaatggagatacttgagtgatgttatctacaagtgctgggctctttgtttgtttgttttgtttttattgcgtgggaggtcttccagaaaacctgctagacaaattctaaaagaaatataacactcatgctgggttctattgtgagagatttatataaactagcttgtttaatagttacacaagctctataaggtaagtactatttttttagttctctctactttacagattagggggaataaaacacagaaattacatgattttctgaatacagaaagattattacataaagcaagtaagcattaggggccaggatttgatgccagcacttgggtcagtgctctgtggcctcccagtgagttatccgttaaccaccactccctaccatctctctgcacaagaatgcacaaaggcacacatttaaaaatataatgtcagaacatgcctctaacatttattattattccagttgaaattcatctcatcagacttgcctgctagaagcattacctttgtgtcaagggctgagacatttaaaagttttgtttttcttataatagcagcagctaagttccatttttaggcgtgcacatattgaaccatggtgtgaattgcgatagtaaggttttagagtctataaataatgcctagtgaaattggagccattcagtccctagaaatatttatgcctatctgtggctatttgtctatttgcatgattatccttgccattatcctccaggctctgaaaatacacactgaaaggtttcttaccagcttgttcatgtctggattcacattaactctatgaccatattttattccagacacttctgagaaattcatcaggctgtgaagcgcgccgtgatgaatatcgaacagagtttaccacagctttgcagcgcgttgacttattcatgggtcaattcagcgaagtcctcttaacatctatatccaccttcattaaaggagacctcaccatagctaatcttgggacatcagagggtcgcttcatgcaggtaagtgctttctgagagtagctgtgtctgttctatctggtattgtgcaattaatttgttttcgtttttgcagtaaggtatttgcaaatactgtaaagtccaaatcatagtagaaactggaacacagactgaaagccaaacaatgaagcctggtctactttctgttaaatgtgtggtctctttttattaagttcttgaagctttcagtttgaatctgtttgctttaattttctcgtccagaatggtgtggcattttttttccatttataatttctgtcacgtgattggaaaataaaatgaaacaaagcacttctaggcaatttttttttatttcaagggaagctacagatcaaaggagagctattgtgtgaaccatgcatcttcatgagaagaaacattcacatcattgagaaatattggcaggagttaggaagggacaacattatcatcaaaatcccattgtaactcaagctctcctgattctgtaaaatggtagggttggatgcaaataagttcagatacaaaaaaaatccagattttattaagaaatggttttaatggatagcaacagtatttctgtacaacaaaagtttccatttcaacttactgtgtttcctagatacaagaaccatagcactttgcagaaattaaaagactctcttgttgggttggtttttgctgttttgtagttattggtgcctttaacatgagttgttagtagattcttgatgaggaaagaatgacaatagcatctatggaaatcttgaacttctgtgaatactagaaatttcttttaaagggagatttcgtaattgtctgatgtagttagtaccctcatcagacaataacctctagtaaaccaactgagaatgataagcttttcctataacttgcctgtctatacatcctatatgtgtattcttctacaaaacatttttttaattaccactctctttatagcagcctggatattgatcattgccatattttaaaacctgtaagttatgtttttcttgtactaaagggcatggtggaattttttcaaggtcaaaaaccatgtaaataaaaccttcctagctcaaaactaatcatacaggtcctgttatctaattattcccctagtaatctcccttctattgcttcacattgaactacgccttttctccccctttcctctgtccattccactgtgcttgtttatccaactcatccatcttgaccatttaattctatccttaacttctcaaacctgaaggagggaagccccgcccctcccacagagacatgcactctaatggatttgaaatatgctcatatctattatgtgtaaaatgtgtagtattgttctgtgtttatacatgtttttaatttacatcaatggcattctatacaattgcaaaaatacaaagaaggactagaaaagctggcatctattgatttcctaatgtgttcattatgttgatttgcccccttttatctttatttctgcttttttttttttcaaaatcgtccattacctcaccaatccagttttgtatgaataagctttttatgattactttagctccgactttttttaacatcaaaagttccctggcctatttccacattctaaagttgtaatacaattccttatttaaatatgttgctttattaactgagtaaattctgctgtgtgacagagtcaatcgcctgagggatatgtcacgcatcagtctcattatagaaacgctgtagcaaatgttttattcttgtctcctagcctttgtgtaaaagaaactatattttgcctattaactatgcatccaaaacaaaaggtaaaaaaaatgcttattttatgaaaagtactggtatcactgattttttttaaaagtggcttttaatttatcaaataagtatcaagaactacctaactttgctttactatacaaacgaatgaagcaaaggaaacagtgacacagaacttacctttaagaaattaaattttagtaggaaagatacctgataataatagtacctacagacaaagggctattcgaaaccacagagaatctatttctctgacgcttgcctaagagaatttcattccattaaattttataaagaaacctaaagcatttgaaggatcaaacaatcaacatcactgaagtccatatatttacagtaaataatagtgcgggaggagtcaggagtggagcacagatatggcaacctcccactttaatctgtcagagcagtgacttcctacaaagttctgtaaatgttttgactgcaccacagtgttaaatgtatggctaggcctgagtttctacaactcgtgttttagtaaatacgatgaagtttctgttacaaaatagaatggacattttttttccccccaaagacagctgccctacacaaaagggaacagaaagatgattttacttccttcctaccctgaagcctaatggcaaagttgctttgcaaatttttttctcccaagagtttgcagctgtttctgtctttcctattgtgcttatgttcagctctggctgggaacacaagctacagccccagctgttgggtgcaaagtgaatcaggtatttcacagtggtcatttgattagaaagaattatattgtttagctaacaacattttgtgtatggcagggaagacatttttgacatgttcctaacatttaatgatgtgtaacttatcttgtacaggtgcagctatatctgaaaatactgatgcatacatatatttaagtctcaatatctgcagagccatgtcaatgtagatgaagatttaaaaataatttttatttgcatgatcactctcttgggatacttcgaagtaaaatagtaggataagcaatgtttgagatagtgtaagtgaacaatgagaacgtgccttcttacagactggggaaggagatgtagaacagagtcagacttgggaacattaacacagtgtacacagctacgtgggagagggaagagggattctcatgaagatcacaggactaatcacagggattgtccacgtctcccttctgagcgcctcgtctaatctacatccagaacaatgcttccttgattttttttaacagcacttgtataaggcttttaatctctaaatgcaaagcattgctattaaaatatttgtgcatgactgtcaggccagggagagtgagtggatcagggatgcgagagggggtggggaggccctttcaagaattgtttcaagttcagctccacaaatactcactgggcaactactatgtgcactacactgtgcctgctcccaatggccacagcctgggcactgtcactgctgctactgggctccgtggttccatcctagctcttcccgcatgcccctttcgcctctccaagttcctaaatgttgttaccacccactcatcactcctgttctcttctgcctcttaactggactagttggatcttaagtaagaaacccaaggaggtagagatcacctaaaaagatgtcccatgttcaagatcattacttatgaccactacttaaaggactgtgttagtaatcagtgaacctaagaataattactcacttccaataagaaaaatttgtttatctgttgacctcctgtcttcaaattccttcagttcccgtgcccccatcgtggcatgtcagtgctttctgtgagaagcctgtagtatgcatcatgtttggaattactgccattttagagtatgtagatgcagatccccaattcgtcaatgttgtgaacatctggcagagacacagctgaaggaagcttcaacttgaacaatgattctctttagggatttctaacttacccatctcttttataaaataatcagataaaaatattatctgcctttttgtgtgtgtacatcattaacttagttttaaccctaaagaatgttagctttggctttttttttttttttttcacagtgtctcgctctgttgcccaggctggagtgcagtggtgcaatcttggctcactgtaacccccacctccagtattcaagcaattcttgtgccttagcctcctgagtagctgggattacaggcacgtaccaccatgcccagctaatttttgtacttttagtagagacgggtttttcgccatgttggccaggctggtctagaaatcctggcctcaagtgatctgcccgccttggcctcccaaagtgctgggattacaggtatgagtcaccgtgcccacaagatttggtatatttctttagaggaaaatacactcaagggttctgaaatttcttttgtgtaagaaagaactttttataaataataatttcagttatgtccataactaaaaatcaaggattccatttatatgaaatatctagaataggaaaacctatagagatagaaagtagattagtggtagtcaagggctaagaggatatggggagactgggaatgacagctaagggatgtggggcttctttttgagataatgaaagcattctacaaccctgtctcaaaaaaaaaaaaaattaaaaccgttcaattgtccactttaaaaacaatgggggaggtatacagaaactgcatacaaacatcttatcttaaattgtattcatcattcttaaaatttaattctattaataaaacggtttaattaaagataaaactgtatatgggaggtaaggagatatggcctttacatatttgtggatatctcacacaaagttactttgttcaggtttacagatttgggggcctagccacaacagttttatttgtacatgtatttcttccccatgtcctatctacaaggggctatgtgagatcaaaaccacaaccatttggtaaattcagattctgccctgccccaaatgtattagtcctgtattttcaaggccattaaagaaaaaatatcctgtgacctaattactaaagattagttgttgaatagtaggaactcaaagataattgttggtcttctattttatgcgaattcttctaagattcccaggttatttatcataagaattacatttacatggcaaatttagttctgttcctagaaatatctccatgacaaccaaaaggaactcctaatttctggcacacattacttcaggggtattttgagagttaaagtggttaatcgattatttagaatcctagcaataagagaaagaaaagaattaagggtagaaaaacatttatagcagtaggtatccctgcagagaacgggctaatgatcaactaaaaaggcatttgcatctgtggtacagcctctgcgcaaaattccaaatggcattctcacttccaagtcacctcacttctccatgtgccttcctgtcttctcatcttcatcccattttctatagcaagcaacactcatgctaactcgtgatcaaaagtagagcttggcggagtgtgctagtaacattttctctatgccctcaaaaactagttagatgcagagactttctccttaggcacacttaacttgtgcagcaaaaattactgaaacacggagtaactggcgaggcaaatatattgtgaaatttgttttagtacttttactcacgagtggctcttgggagctcagagttgaagctttttcaatggtatttactctggtgctccaagagcctagcagttgagtgtttaagaggtcaagcacatggattctggcctcagataaagctctgtggaaatctgactcatgtactttctagctgaaattctatgttgtattttttttaaggaaaataatagtacctaccttataggagtattgtgaggagtaaataaaatctccatttaaagcacttggcacaatatgtgactcagtttcctgttatgaaagtacaaacatttggtgcttttcagacaaagctttttaacagaggatacacatatcaatcaatccaagtccagaggtgcaaagagcttccgaaaagaaagagaaaggttaattctttctgggaaaggactatttggatgggcttcagatatttcataaagtcaaagatgatgacctagtaattaagaagggattgcttattatagatttgggaaatggtattaaaaagagcaagaaggtaggagaaaaaaagggctctaggaggtgattgttatgtagccggtctaagtagaacggaggaaaccagggagacagacacaaaatgcaggtgtccattgcaaggttcatagtgatgaataatcttcagtgaagtgcaaagcatagaatgagctggaaaacaaagtcagggtattaagacagactggtgttctgtgttgcttttgacctgtgtgtgagaaaaggagtttttttgcttttgtgtttttgtttttgttttgttttttgttttacctttgcagtttgaagtgattggcaacagccaaagaaatatggggggtattgggcaggagtataggaaaaatgagatgtgatgagcccagaagggagttaagattgcaaaattgggtaaccaaaatctggagaatttgtaatagaagctttagaagtctaacatctgatattctgcttgtaaccagtacccaaagggaggtgggactggtaattgaatttctgttcactttgcctgcaaaggtcaccaatacctattgggccctaactttaggaaataacaatagtttccaacctttcccatcctgaccaagtgacccttcatccatcacttaacttctgtgcaaatataaccaccctttttaatggagatgttttgaaagcgttgagtgtttagagtagaacaaacattagagcacaaatgtcatgatgtttaacttttacagctgtatgtgagcttggttagtttctctatcaacaatccactctctgagaacaaattaggtactttgagaatcttcccaaattgcttcaggatacttggctcctttgttatgctgaagaaaaaatttacaattgttccccagaacatttatatgttgtatgtgtttgttagagtacaaagcagttaattattgctgtaattttcattcccattatacgaatgagaaagctgaggtagagggagtgactatgtaatcgtaatctcacagatgtccatgtttgtcctgtgatttcatacccatcgcgagtaaatgcatgttcaatgcaatgtaaaaggctattagagatgttgggcaatttcacaaagtagatttcaagtctagggctgtgctgagcctcctccaccttcatgtatatgcaacccagtggcctacttaagagtgaaagtttctctgagaactccaacaccctcctaaaaatctaagtgttcatgtaagataatcatttggattttatcccaattgttgtcaattatgctctgaactttattattactgggttctaggaacaggacagatggaaattagatagctgggaaacatcccaaattttaaaaacctgaaagcaaaaatgacatcaatcatcaaacctcatttcccgggcattgttaaaaccatcaggccttattttaaagccagaccaagaagcagagttttataatccaagtaataatatattgtgggacagtggtttataaaaaaatacaacacatcatttcaaagtagctgggggcctgttttgacctgaaaagatctataaatgtggcttaagagtagcacagctggaactagctccagtattccagactccgcgtccactactcttaaccattacatcaagggaaactgcctggcagggaggattaagaggatatatttaaaaaataatccagattcattgtagcatgtgtggtgtcttctttctggagagagttttggttcctccattttccaatacaattgcagggatttgtctgtatgtgctgccaattgattgaaagatctctttcccttgaaaccattaaaagatcataggcaaagtctgtcttgggggttcagataatttggcttcaaggcaagagattagaagatgacatattgatttacaatgaggggaactgttgggtcttcagttcaaacacccacaagccctgctaatctgttattaccattatcatctacattttccacttatatttaaactgagcttgttggaataaggatgttataacttttttgctgtttaggttgtggtttctcgatcaggaccatcaacccctcatgtgaattttctcctggactcccatccagtgtctccagaagtgattgtggagcatacattaaaccaaaatggctacacactggttatcactgggaagaaggtaagctgttcccacagggaatttccatagacgtggtttttcccaaatgcatatttacaaccagtgtcacttggccctttataatgtctctcttcatcttaaatttacccctcctccattaagttctttagtgagtattccagagatcttctgaaatctagttaatttgttctccaagaaagactagacctaagggaggtctttttcaaaacttctccttttgtcctatatttctcaacaagaaaaataaacacacagaatgagaattacagtcctaatgacagagctctagtgcaggcagataaatcctggaaatgtacattggaatccgactccaaccaataatcccttttctcctagagaagaaagtgcatcttgatgccagaatgacatgcaactttacttagaattttccagagattcaagtgtgttttcccaccacttaaattatactctcttgttattttaaaatcatctcagacagggcacaatgtccctactatgtagaacctctaacattgtgtggcaatgctatgctcactggacaataatgttactttttcacatacctgctaacaataaaggaaaggaaggaatcagatttttaaaattttaatcaccgttatgacaggatttgcacacatagttgctaagtctagaaaattccatcaaatgatatttacatgtaccttttgtgtacttactttataattaattaacaaactagatacccctctggaagctctttccaccccttctcttcacagatcacgaagatcccattgaatggcttgggctgcagacatttccagtcctgcagtcaatgcctctctgccccaccctttgttcagtgtggctggtgccacgacaaatgtgtgcgatcggaggaatgcctgagcgggacatggactcaacagatctgtctgcctgcaatctacaaggtaggaatctctaacagctggcatacatgtttttgtttggtgttttttttttttttttggtttggtttggtttgttttttgtttttttagatacaaatcccactaatgaaaaaaatttaaaaatcaatttactcatttagctgtgagtcatcagctaaagcaccatctctctcttggctttatccctcgggcagggagggggtggtgtttgggcatccccccaagtcctgcacctgaagtgcttgcttcacattgtctaggttctatcgctgggcagctgctcacctttagtgccgtgtgaataaaagagtggtggtgaataagcaacagtgctccccattttctcacactggggcctgttccctcctgactcacccactctctgattcctcgccacttcctatataggccaagtgcccagacatgagcctccatcacagaaacagatctgttcatggcatatcctggaaccctgagctgaatcctgcaaactggtgatccctgccatgctggggcacacaggacagttttcttcctgtccgatgcatagatggtggccttgtctgttcacagatgagactgaagattatttcccggggtgaggtgggcaaggcaagtggagggtcaacacccatgggtggctgtgagtcttccttcagtgttcccagaaaaaaaagcaaaggctcaacggatgactatactaacatctatacttctgtaagccatgccactctttaattcattccaaaaatatttattgagtgcataccatttagcaggctgccctctagtccctgaggagatatagtccagaacaagatgagcacatctcttgctgatagagaactcagtttctggcaatggacattggctctaacatcgcagccatgctaactgtgttgccttatttgcttaagcatatattcggcactatgaaaatctccacgcaatttttaaaaatttcttagtccaaaacatcttgcttaaaaacacttccctggtgagaacccagtgtgtatttttctctgtgtgcatgtagaaaagttggactttagtaaatagttcttatgaaagattcaagttaaaggtctcggtcacctggttcatgcccaagtaaacaaaatgtgcgagtcagaacaagaaccacccccaagtgcatggctgttttcatttagttacggtttggagcaagatttgtagtgggtgactgggttttaaaccaagttattttctgttaggtgtgacacagttattaagacttagcttgattgaccagagaataaactaaagacagtgacaaaacaaatttaaatctatactgtagtatttgtgtacttttttgttgttcagtatacttttggaaccgtatgcaattttatacttttataaacaaacaacttcagcaatttgagacactaggaatctgaactctgctattccatgaaatagatatggaaaatatatgtgtgtgtgcccatgcaattaaatcacaacaatttcatttcaaaaataaccaagctggtattttaagtaaagaaaatggtttgataacctgtacaaatgaaacatttaatttttactaatgtgcttccttttactaagcataaaagctatactaaaatgcttaaaaataaagtaaatatttcagaattttctggaaccagagaatctcttgcaatatttaaatgtccctcctctctcacccttcttaactctagcattctatagttgatgattctcaaaggttgcgtgctaccatgcacaagtcagtgaggcttaagctgcagttaggaaggcagggcagctgagtccataaatccctctaggttcatagttgttaggaagatttcatgctgcaccagactgtgacagttagcattcttcctgcaaaacataagacagactcgaggtgggtgttaagatggccgagtaggaacagctccggtctgcagctcgcagcaagatcagtgcagaaggcaggtgatttctgcatgtccaacagaggtacacggctcatctcattgggactggttagacagtgggtgcagcccacagaggttgagctgaagcaaggtgggatgttgcctcacctgggaagggcaagggattggggaactccctcccctagcaaaaggaatccttgagggactgtgttgtgaggaacaatgcattccggcccagatactacacttccctatggttttggcaactaacagaccaggagattccctcatttgcctacaccaccaggaccctgggtttgaagcacaaaactgggcggccatttgggcagacaccgagcaggagttttttttcataccccagtggtgcctggaatgccagcaagacagaaccattcactcccctggaaagggggctgaagccagggagccaagtggtctagctcagtggatcccacccctacagaacccagcaagctaagatgcactggcttcaaattctcactgccagcacagcagtctgaagttgacctgggatgctggagcttggtgcagggaggggtgtccaccattactgaggcttgaataggctattttcccctcacactgtaaagggtacagcttcagcagacttaaacattcctgcctgctggctctgaagagagcagcaaatcccccagcacagtgctctagctctgctaagggacagattgcctcttcaagtgggcccctgacccctgtgcctcctgactgggagacacctcccagcaggggtcgacagacacctcacacaggagagctctggctggcatctggtgggtgcccctctaggatgaagcttccagaggaaggaataggcagcaatctttgctgttctacagcctctgctagtgataccctggcaaacagggtctggagtggacctccagcaaactccagaagacctgcagcagtgaggcctgactgttagaagaaaaactaacaaacagaaagcaatagcattaacataaacaaaaagaacgtccacacaaaaaccctattcaaaggtcaccaacatcaaagaccaaaggttgataaatccatgaagatgaggaaaaaccagcgcagaaaggctgaaaattccaaaaaccagaacacctcttctcctccaaaggatcacaactccttgccagcaaggaaacagaattggacagagaatgagtttaacaaattgacagcagcaggcctcagaatttgggtaataacaaactcctccaagctaaaggagcatgttctaacccaatgcaaggaagctaagaaccttgaaaaaaaagctagaggaattgctaactagaataaccgtttagagaaaaacataaatgacctgatggagctgaaaaacacagcatgagaacttcatgaagcatacacaagtatcaatagccaaatcaatcaagtggaagaaagaatgtcagagattgaatatcaacttaatgaaataaagtgtggagacaagattagagaaaaaagaatgaaaaggaatgaacaaaacctccaagaaatatgcgactatgtgaaaagaccaaacctacatttgattggtgtacctgaaagttacagggagaatggaaccaagttggaaaacactcttcagaatattatccaggagaacttccccaacctagcaagacagcccaacattcaaattcaggaaatacagagaacaccacaaagatactcctctagaagagcaacaccaagacacataatagtcagattcaccaaggttgcaatgaaggaaaaaatgttaagggcagccggagagaaaagtcgggttacccacaaagggaagcccatcagactaacagtggatctctctgcagaaaccctacaagacagacacaagacagggatgccctctctcaccactcctattcaacatagtgttggaatttctggccaggacaaacaggcaggagaaagaaataaagggtattcaattaggaaaagaggaagtcaaattgtccctgtttgcagatgacatgattgtatatttagaaaactccatcgtctcagcccaaagtctccttaagctgataagcaactttagcaaagtctcaggatacaaattcaatgtgcaaaaatcacaagcatttttatacaccaataacagacaaacagagagccaaatcatgagtgaactcccattcacaattgcttcaaagagaataaaatacctaggaatccaacttacaagggatgtgaaggacctcttcaaggagaactacaaaccactgctcaaggaaataaaagaggatacaaacaaatggaagaatattccatgctcatggataggaagaatcaatatcatgaaaatggccatactgcccaaggtaatttatagattcaatgccatccccatcaagctaccaatgactttcttcacagaattggaaaaaactactttaacgttcatatggacccaaaaaagagcctgcattgtcaagtcaatactaagccaaaagaacaaagctggaggcatcatgctacctgacttcaaactatactacaaggctacagtaaccaaaacagcatggtactggcaccaaaacagagatatagatcaatggaacagaacagagccctcagaaataataccacacatctacaactatctgatctttgacaaacctgacaaaaacaaggtatggggaaaggattctctatttaacaaatggtgctgggaaaactggctagccatatggagaaagctgaaactggatcccttccttacaccttatacaaaaatttattcaagatggattaaagatgtaaatgttagacctaaaactataaaaaccttagaagaaaacctaggcaataccattcaggacataggcgtgggcaaggacttcatgtctaaaacaccaaaagcaatggcaacaaaagccaaaattgacaaatgggatctaattaaactaaagagcttctgcacagcaaaagaaactaccatcagagtgaacaggcaacctacagaatgggagaaaatttttgcaatctactcatctgacaaagggctaatatccagaatctacaaagaactcaaaccaatttacaagaaaaatctaacaaccccatcaacaagtaggcaaaggatatgaacagacacttctcaaaagaagacatttatgcagtcaaaagacacatgaaaaaatgctcattatcactggccatcagagaaatgcaaatcaaaaccgcaatgagataccatctcacaccagttagaatggcaatcattaaaaagtcaggaaacaatatgtgctggagaggatgtggagaaataggaacacttttacactgttgatgggactgtaaactagttcaaccattgtggaagacagtgtggtgattccttagggatctagaactagaaataccatttgacccagctgtcccattactgggtatatacccaaaggattataaagcatgctgctgtaaagacacatgcacatgtatgtttattgcagcactattcagaatagcaaagacttggaaccaacccaaatgtccaacaatgatagactggattaagaaaatgtggcacatatatgccatggaatactatgcagccataaaaaaggatgagttcatgtcctttgtagggacatggatgaagctggaaaccatcattctgagcaaactatcgcaagaacaaaaaaccaaacaccgcatgttctcactcataggtgggaattgaacaatgagaacacgtggacacaggaaggggaatatcacacaccggggcctgttgtggggtcgggggaggggggagagttagcattaggagatatacctaagtaaatgacaagttaatgggtgcagcacaccaacatgcacatgtatacatatgtaacaaacccgcacattgtgcacatgtaccctagaacttaaagtataataaaaaatatatataaaaaaagaaaccctacaagccagaagacagtgggggccaatattcaacattcttaaagaaaataatttccttcccagaatttcatatccagccaaactaagcttcataagtgaaggagaaataaaatcctttacagtcaagcaaatgctgagagattttgtcaccatcaggcctgtcttacaagagctcctgaaggaagcacaaaatatagaaaggaaaaaccggtaccacctactgcagaaacataccaaattgtaaagaccattgacactgtgaagaaactacatcaaccaatgggcaaaataaccagctaggatcaaattcacacataacactattaaccttaaatgtaaataggctaaatgccccaattaaaagacacagactggcaaattggataaagagtcaagacccattggtgtgctgtattcaggagacccatctcacgtgcaaagacacacataggctcaaaataaaggggcggaggaagatttaccaagcaaatggaaagcaaaaaaagcaggggttgcaatcctagtctctgataaaacagacttcaaaccaacaaagatcaaaaaagacaaagaagggcattacataatggtaaagggatcaacacaaccagaagagctaactatcctaaatatatatgctcccaatacaggaacacccagattcgtaaagcaagtccttagagacctacaaggagacttagactcccacacaataataataggagactttaacaccccactatcaacatcagacagatcaaggagacagaaagttaacaagggtatccaggacttgaactcggctctggaccaagcagacctaatagacatctacagaactctccattccaaatcagtagaatatacattcttctcagcaccacatagcacttattctaaaattggccacataattggcagtaaaacactcctcagcaaatgcaaacaaacagtctctcagatgacactacaatcaaattagaactcgagtttaagaaactcacttaaggccgggtgcagtggcttacgcctgtaatcccagcactttgggaggctgaggcgggcggatcacaaggtcaggagatccagacatcctgactaacatggtgaaaccccatctccactaaaaatactaaaaattagctgggcatggtggcgggcgcctgtagtcccagctactcgggaggctgaggcaggagaatggtgtgaacccaggaggcggagcttgtagtgagccgcgaaggcgccactgcactccagcctgggcaacagagcaagactccatgtcaaaaacaaaaacaacaacaacaaaaaagaagctcactcaaaaccacacaactacctggaaactgaataacctgctcctgaatgactactgactactcggtaaacaactggtacatttgttatttttcaagttaaataatgaaattaaggcagaaataaataagttctttgaaaccaataagaacaaagacaaagacacaacatatcagaatctctgggacacagctaaagcagtgtttagagggaaatttgtagcactaaatgcccacaggagaaagtgggaaagacctaaaatcaacccctaacatcacaattgaaagaactagagaagcaagagcaaacaaattcaaaagctaacagaagacaagaaataactaagatcagagcagaactgaaggacatagagacacgaaaaaccccaggagctggttttttgaaaagatcaacaaaattgatagactgctagccagaatcatcaagaagaaaagagagaagaatcaaatagacacagtacaaaatgataaaggggatatcaccactgatcccacagaaatacaaactaccatcagagaatactataaatatctccatgcaaataactagaaaatctagaagaaatggataaattcctggacacatacagcctcccaagactaaactaggaagaagttgaatccctgaatagaccaataacaagttctgcaattgagacagtaattaacagcctaccaaccaaaaaaagcccaggaccagacggattcacagccgaattctaccagaggtacaaagaggagctggtaccattccttctgaaactattccaaacaatagaaaaacaagggactcctccctaactcattttatgaggccagcatcatcctgataccaaaaccagacagagacacaacacaaaaaaagaaaatttcaggccaatatccctgatgaacatcgatgtgaacatcctcaatacaatactggcaaaccaaatccagcaacacatcaaaaagcttatccaccacaatcaagttggcttcatccctggaatgtaaggctggttcaacacaggcaaatcaataaacataatccatcacataaacagaaccaatgacaaaaaccacacgattattgcaatagatgcagaaaaggccttcgataaaattcaacaccccttcgtgctaaaaactctcaacaaactaggtgttgatggaacatatctcaaaataataagagctatttatgataaacccacagccaatatcattttgaatgggcaaaagctggaagcattccctttgaaaaccagcacaagacaaggatgccctctctcaccgctcctattcaacataacattggaagttctggccagggcaatcaggcaggggaaacaaataaagggtattcagataggaagagaggaagtcaaattgtctctgtttgcagatgacatgattgcatatttagaaaaccccatcgtctcagcccaaaatctccttaagctgataagcaacttcggcaaattctcaggatacaaaatcaatgtgcaaaaatcacaggcattcccatacaccaataatagacaaacagagagccaaatcatgagtgaagtctcattcacaattgctacaaagagaataaaatacctaggaatacaacttacaagggatgaaaaggacctcttcaagaactacaaaccacaagcaaatggagaaacattccatgctcatggataggaagactcaatattgtgaaaatggccatattgcccaaagtaatttatacattcaatgctatccccataaagctaccattgactttcttcacagaattagaaaaagctactttaaatttcatatggaaccaaaaaagagcccgcatagccaagacaatcctaagcaaaaagaacacagctggtggcatcacgctacctgacttcaaactatactacaaggttgcagtaaccaaaacagcatggtactggtaccaaaacagagatatagaccaatggaacagaacagaggcctcagaaataacaccacgcatttacaaccatctgatcttttacaaacctgacaaaaacaagcaatggggaaaggattccctatttaataaatgatgttgggaaaactggctatccatatgcagaaaactgaaactggaccccttccttacaccttatacaaaaattaactcaagatagattaaagacttaaacgcaagacctaaaaaccataaaaaccctagaagaaaacctaggcaataccattcaggacatatgcatgggcaaagacttcatgactaaaacaccaaaagcaatggcaacaaaagtctaaattgacaaatgggatctaattaaagagcttctgcacagcaaaagaaactatcatcagagtgaacaggcaacctacagaacaggattaaattgttgcaatctattcatctgactaagggctaatatccagaatctacaaggaacttaaacaaatttacaaggaaaaaaaccatcaaaaagtgggccaaggatataaacagacacttctcaaaagaagacatttaggtggccaaaaaacatatgaaaaaaagctcatcatcactggttattagagaaatgcaaatcaaaaccacaatgagatcccatctcacaccagttagaatggtgatcattaaaaagtcaggaaacaatatgtgctggagaggatgtggagaaatagggaatgcttttacactgttggtgggagtgtaaattagttcaaccattgtggaagacagtatggcgattcctcaaggatctagaatcagaaataccatttgacccagcaatcccattactgggtatatacccaaaggattataagtcattctaatataaagatacatgcacacgtatgtttattgcagcactactcacaatagcaaagacttggaaccaacccaaatgcccatcaaagatagactggataaagaaaatgtggcacatatatgccatggaatactatgcagccataaaaaaggatgagttcatgtcctttgcagggacatggatgaagctggaaaccgtaattcccagcaagctaacacaggaacagaaaaccagacactgcatgttctcactcataagtgggagttgaaccatgagaacacatggacacaaggagggaaacatcacacataggggcctgtcgggtggcgggggtctaggggagggatagcattaggagaaatacctaatgtagatgacagataatcttatgtgtcttaaactttgcaggcacaaaatccagctaatgtatggagtttcactttctaatacatgcaagttaacctgcttttcaaggtacatgatgttcagtggctaaaattctttacagttctagatatgagagatttcaggactgtaagcccattattttgcttcaaacatggtatctgatctcatacttaaagagcaatgagaaatgcttcagaaaagggagagcactttttaatatattctgaatgtattaggatgcagttatcatatcttgtaaggttgaaaattcaggccgggcgtggtggctcatgtctgtaatcccagcactttgggaggccgaggtgggcagatcacgaggtcaggagatcgagaccatcctggctaacacggtgaaaccctgtctccactaaaaataggaaaaattagctaggcatggtggcaggtgcctgtagtaccagctactcgggaggctgaggcaggagaatggcgtgaacctgggtggcggagcttgcagtgagccaagattgctccactgcactccagcctggatgacagaacgagactctgtctcaataaaaaaaaagaaagaaagaaagaaaattcaaccccagtgagacaacagaactattcattgatcagaatactcagaaaagcagtattatatagggataggagggtaggcaggcagtatactgccaccagtaaatatatttgtgagttctactaaagaggaaaggagaccccttttggagtttttttgttctgttttgtttttgttttttagttttctcatgttttatcctaatgggttttgaaagcatgatcatttaaaatactgttggaatgggcccatcagtgatgtgatctttcacctgtgaaaagacaagggctacttttgtggctgtatctcccctatccagacaggtaggagacccagcctctgtggctttatgccggacgctcatttcctgcccacagagtttctctgcccttcaggataactcagagtttgccagccattgttgggtctatccaagggtgtgtagttcacaactgcttccttcctttttccctagaagggtaaaggttaccccataagctaaggggaaaatgcccagcccagagagaaaagctaagcagagcgagcctcttggatcctgagggtctagcagagggcttataatatctcttcctattgccagtgccccagttgcgcagctctctgcgtcttttctcaaatcatcacccaatccgtttgccttttatagaaagtgatggtaatgatgtgtgtagagtgacagacttcagtttttacatagaaagacgggatgtaggcagtgggatcaggccaacatcagccttgggcagcgttttcagtggggaagcctcctcattagaagagccggcagcagctgtgtgactgcctcaggctgaagagagtcctgggagggttggatgtcttgttctctcctactggatttctaccataataataataaacagatttatttttctagtagttctcatttgactagacatggatgaggtaaattttcaggaaaggcacaacagtgtaatggatttttatgggtaaaatggctatcataaaagctttaagctaaaactttaaaggggtttgataacgagggtacattaagactttggtttgcaattatttacttaggaaggatggaaatgtttgcaagtttgaatttggctaaaagcccttcttaattgtaaaagaatcacttttagatgttcacaagctgagctttagcaaatacctttactggttcttgagttgcctctatcttagttttcccaccattgtactttacagcacaatttacaatatgtccccacccccaaaagagcatttcctttctcaattgtcacaaagctgctgagaagaagcttatttttaacttggaaatgtgttttgttttaatagttttagcctgagagcaattatcttacacactttataggtgcctaatgcggtcttaaatcatgactgaccaaggtttatcaataaatccattgataacataccagaaatgagtctgcaataacaaaatgagtctgttatttgcttaacatcaaccatcagggggaaaaatttaatcctaaaaatgagatataaaacaataccaatgaagataattaggaaaaattgttacaatactgattttgggccctctctggttccgtttttatctatttctaaaagaaacaacataacacatgtattaaatattacataatttttaaaaggctgagtgtgtcaactaaccagcctggtatacatcaaatagtgaccatatttaaagaacaaggaaaaatcttcagtcattaataaatgtgaactaataggtaaaaagaagtagattcacttttcatttgttagtgcctggtgcataggaggtgctttattaagaaataattaatgaaacctgggcagcataacaagaccccgtctctacagaaatttaaaaattagctgggtgaggtggcgcacacctgtagtcctgtctactagagaggctgaggcgggaggattgcttgagcccaggagtttgaggctgcagtgagctaggactatgccactgcactgcagactgggcaagagtgagacccccatctctaaaagtaaataagtaaataatgaatgaatgaatgaatgaatgaattattggcagatatgtgttccaaaaccatctatatgtttcatattatgctagctgctgaatgcaactgggcaaacactggataccaaatgaggtatttttactgtgcaacttttgtctctgggtggggaataccatagcaaccagaatgtagtgcacgcagccagtgcacagagcaaggcgtataatggctggaccttggcttatagagcacatgaaggagtttgataagagctcagtccgaaggctgatgaagagttacaatcagagttatgagcaagtaaaagtctgggcccaacgtgtttctactcctaccctaaagagccctagaagatgaattcacttcagaatggcccaaaaagggccaggtccaatggctcatgcttgtaatcctagcactttgggaggccaaggcaggaggatcacttgagcccaggagtttgagaccagctgggcaacgtagtgagaccctgtctctagaaaaaaaaaaaatagccaagcatggtggcccacgcctgtgatcccagctactcaggaggctaatgtgggaggattgcttgagctcaagaggttgaggctgcagtgagccatgatcacgccactgcactccagcctgaacaacagagccagactctgtctgaaaaagaaaagaaaagaaagaaggaagaaaggaagggagggaaagaaaaagaaagaaagagagagagagagaaagagagaaagaaagaaagaaagaaagaaagaaagaaagaaagaaagaaagaaagaaagaaagagaaagaaagagaaggaaggaagcagagaaaggaaagaaagaaagaaagaaagaaagaaagaaagaaagaaagaaagaaagaaagaaagaaaagaaagaaagaacggaaggactcgaaaagcccctttattcctaccaagctgcatctgctctttgtcccatctttggatctcctgaaaacaacttgtttcattaacatgtcatgtagttttaatgtttgttccagatgctctgaaatttgtgacccttttccctttagtgaaaattaaatttttactaaattgtgggaaaatgaaagaatttcagactatttaaggatatacattttgtttgttcgttttccatatatgtgaaaaattataatatattgggtttttttaaaagttctatgttgtccttgtaggttttcccaaatagtgcaccccttgaaggagggacaaggctgaccatatgtggctgggactttggatttcggaggaataataaatttgatttaaagaaaactagagttctccttggaaatgagagctgcaccttgactttaagtgagagcacgatgaatacgtaaggatcttaaaatgctttgctggggtgtgcttggaaaataggttttgtttttgaatgaatatttcttttaaaattgctcaagaagctcatctcttgaattaaaaagggtcttggcctgtcacatgccttgtgggtctgttctgttttgttcttgtaatcccatttactcattggatttgaagagagagaaaggtgacatggcctaggtgaagagaagaggccagaaatgggagtttctcaaccatttatgcgacaagtcttcaggtgttgtctgagtagatttgcaagagtagcactagttgggatcacttcatccttggagtcttcaaatgtagagtctccaaaggctttttctacagaaatcagtaaacagctcagcatggatcctctcttttaaattcactttctaaacctcagaaatgtagtgaggcagctgaatcacgtgtttgagacttttttagatgagttaaaatttatattcagcttatatttactggcactgcaatatatgggctgtatctcactgaaccatccccacggtcctgggagggagcagtatcattcctataatataaaagaggtacctgaagttcagagagatgaagtgtggcttcacagaggtaatccagagagtaagagctgaacaagccttcagctcagctctgatcatcttctgatccaagacccgtgctagttctactgtattctacatgtacccttctacaagctttgaattccataatcatcagagaatccagaaattattcattatcacataataacaacactcaaatatttaaagttttatggttgaatctttatgattgaacccattctatcaggtggttattttatatctaatagaattcatttcagggttacacaaaggtccgaatctatccattttactgagaccaaaacactaatgaaggtaatatttgttagctgaatggcaaaacaaattttttctagaaatctcccttgtaaaatctccaaaactcttaatcattgcatataaatcaggacctgtaaaagtaaagcataattcattctctcctttaaaaagttatttaataaatcaaattgtatttaaattttctcagaactatatgattattcattcagaaataattctatggaaagccatcacaatttcattatcatttaagtaatttaaataagcatgtacaagtataaccacagaaatgtacctgttgacatactttaatgaagagattggcctatttgtagttagcccattgtttcatatgcatctgaagtggaccaaagattatccccaaatattaatattatccaaacttagattattatgcactattcaactggtgaggtctttatggataaggtctgatatttcctgtttgtctgtataagtgctatagtaccattaatgtaaagtttagtataagcagggtgcagtggcttacgcctgtgatcccagcactttggcagaccaaggcaggaggatcacctgagcccaggaattcaagaccagcctgggcaacgtagtgagactccatctctaccaaaaaaaaaaaaaaatttttttttaattaaccagatgccgtggcatgcacctctagttccaactcctgagtccagaggatcccttgagcccaggagttcaaggctgcagtgagctatgactatgccactgccctccagcctgggtgacagagcaagatcctgtctctttttacataaaaataaaagttaagtttatcatagtatagaaataggattatataatttttggccttaatgcttatcttgaaactctgcttgctattcaaagcagtcagctcaccatttagagttaatgtcacttcctataaaacaacctaaccagaaaattccttggatttgtcatgtattaaactttgggttttttttccagattgaaatgcacagttggtcctgccatgaataagcatttcaatatgtccataattatttcaaatggccacgggacaacacaatacagtacattctcctatgtggtaaggaagattctatcctatcatgtttgatttttacttaatctatttaaattataagatgaacaagttactttgttttgtttttatctcccctccaggatcctgtaataacaagtatttcgccgaaatacggtcctatggctggtggcactttacttactttaactggaaattacctaaacagtgggaattctagacacatttcaattggtggaaaaacatgtactttaaaaaggtgttgtaaatttattttttgttgcatctgtcaatttgaattaatatctgtaccttaaaaattaagcagattgttttgtgtgtgtgtgtggagaagaaaaatcaagatgtttatttgtttactctcctactgacaaaacttcctccttccaaaattcatctactccttttgctgatttttcttcctttctcttgttttttagcaatcctacttttcagttttgtcttcccatccaccctctttattgttatagcttaggatcttagctatactatgagctgtgagagtctggtcattgataataatttaaaataaacattttcatcaagatttgtaattagactaagtcactctggggaaggaagaaatggggaaaattgggtctggaagacagttatgtttctgcttcttagagttggaagagctcagtttaatcaagtaccaaaagtactttaaaggtttttttttcaaatctcaaatgttttccagtcaaggatagcttgtccacaacaaaggtaagtttgagatccagtcagattaaacagcctacactagaaaaggcttccactcaggaaattcccacttaggaaccattgagttatatccttttgatttgtggatataattctaaaatatgtgtatctctaatagctaaaattcacttccttaattttttttgttcagtgtgtcaaacagtattcttgaatgttataccccagcccaaaccatttcaactgagtttgctgttaaattgaaaattgacttagccaaccgagagacaagcatcttcagttaccgtgaagatcccattgtctatgaaattcatccaaccaaatcttttattaggtaagtagaagcttctgatgggtataagaaaacaatgaatacaaggatgattttgctgtagaatagtcaagaggaattgcagttttatctctggctttgatgctgttatgttgcttttgaaggcttctttccaattcaggagagaaaactatattcaggttctgagtgtagtttgacttatcaatgctagttcattccaagaagtatcttatcctgttctattacatttaaacagagtatagcaaaatagtttaatgtggcattgtagtatacatgcacttacattatgtacatatcaattctatactaaccttagtgcccagaagtggaattaccttttttcttccattctctagatatgtttttgtcctgcctgctttacacacagcttttctttatgccagactctctttgaattgatatctcattggacccagttcaatctgccttgtttccgttaattctatcagtctagcaacaatagttaagttcggttttctttgtatttttttcagaggtgaaatatttattttgtgtaattcggtgaataaaatacaaatgcatttcttaagcttatgaaatatgcattttaaaaatattttcaagttaaataagttgtttccaaagaacagttacccatgaacttccatttgatgttgactgtgcctctgacctgtaatcagtgcaggtgattaaattgaatccctctcttacagtacttggtggaaagaacctctcaacattgtcagttttctattttgctttgccagtggtgggagcacaataacaggtgttgggaaaaacctgaattcagttagtgtcccgagaatggtcataaatgtgcatgaagcaggaaggaactttacagtggtaagtcctttgagcaatggttctactcagagctctgcatctttgcctctaaccatgtggctttcatggtacctgagacatctcagtttcgcctttaaggtttgctagttaatttccttgcagtgtagccaagtagtattttttatttaataactgaaattatctagagtcttgggctaaccatgtggaaaaaatacatacacatacacacatgcacatataatgtttagacaagaatgaagattaccaatttgagacagtgtttttttatgtttgttggttggttggttttgagggtttttttgagacagtatctcaccctgtcatccaggctggagtgcaagggcacgatctcagctcactgcaatttccccctcccaggttcaagcgattctccacctcagcctcccaagtagctgagactacaggcacgagccatcatgcctggctaatttttgtattttttggtagagacgaggtttcaccatgttggccaggctggtcttgaactcttgacctcaaatgatctgcccacctcggcctcccaaagtgctgggattacaggcatgagctactgtgcctggcctgaggcagtgtttttacagacagtcagtacaaatggaaatcacagcatttccctagtccctttttaatgtgtcatagaacatggacccttttgctctaataaaatccttggaaaaggttgctgatcttgcagcagtattcttgcatttctaagcagctgacgtatgctttcttacagccccctgttcttcttatcattcttcttgtccctttgttagctctttcttgaaagagctaacaaagaaagagcattagaatatttatgttatgtcctaaagtgtgaatgttatttgctgtttctccacctatccttattttatataggtcacattaaagtggtagttttagtttagaccttagaaagcttggagttatttccaaagattccatacattttgttgatgtttttctctaatataaaataccataatctagtaggacttgagcactcaactcagaatgaaagttctaagtgctcttgctcaagcaaggtcttgattggtcaggtgatagattgaattacagcacttccttttagattctccatccaatatttcttgaagactaaagccacaatgttctttaattacaaaaaccaatttggggctaaaaatgtcaagccaaatcaccaaataataaggtcatttcaaataagatttttcttggccttctcaatcagccacattgcatcacctctagagagtattattagatttttatcatattcctgagagattgtactctagggagtcaccatatgaagcaaagcattttgaaaccaatccccacacatggccacaaacaaagttagagtaccactgctattaatttaaaggacatcagttctccacaactaagcataacaatgtttcattaaccaaataagaataatagtgaccctctttggtgttggtatgagaccttttaaagtagaaatctgagaaattattagtttatctaattaatgctgagcctccattattaagataatgactgaatttcctttcttctccctcattggcattaaagtgacactcagaatgccttagcttcagtcattcatttgtaatcaaatatttattaaaaactttttaggtgtcacacatgagagttacatatcccaaggatgattcaaacaatggtagacgataaaaatcttatttgtttatatatctggaaatataaacttctgttgttttagtgacaaacatgttagtacagtagaactgtacattagaatcggacaagagtgaaaaattcagtggatctattttactatttactatttattttactgtcgtttgtgaaaagtactttataaggagatatgtattcattccatgttccttgccacttatagaatttaaagctgaccatgatgaattgaacccatttattatttaacaaataaaaactcttggtcaggtctgatttagatatataggtccagccacaataactttaagtccaataaacttgaatcctttcaaaacaagaacaatcatcttcataacaaaatgtatattaaattgttaacatgtgcattatgccctaggagcctgcagtttattgtgtagttctcaaatttcttgttatgtaaacaattattgtgatgacagttaaattgttcatgtccatcaggaataaataacttttagcattataatattaattttatataaaactaaatagtataattttatccatattatatctctatcagttttatctgctgcctatatacatttttaatgtaagatcattttttaaatgattttttaaagaaaatagcaaataacaaattctgtttgtcctttttatgtatatcctgagtcctttttctattgtgggcataagtaattgttttatctccaactatacttgtcaaagaaaaggaaatctaagggatgttgttgcttgtttgtcttttccttgggggaaaaatgcaaccgttaaccttagatgtaccactatgtgttgctggtttagtctaagtacaatcaagaggaagctacattttccaaaattccataaatcagaattccaaagaggaagatttgaaatgagacatgaaagggcatgaaataataatagcagaggctttgtaaaatagagagcataggaaaaggtttcagtataaaatatgtcatagacaaaaagatagcatgggagtgaagacactgaattttggagttaatggcctaggatttatattcgctattctgccactccaagctgtgtgacctggcctaatgacataagtttgcaaagctcagtttcttcatttgtaaactgtgggtaatcataatacccacctataggattatcaggagaattaaatgagaccaactttgtaaagtattttgcacagaacctggcattcaataattaatagcttaaaagacactaataagattacctaacaacatagttaattatcatgttcaccatatggtgcttggtgctttacaaagcactttaccatgtggtatccaacatggtaaatagcattttcatcttaattcctaaatgaggaaactgagttattcagtgtgggccctaccttagttcccatagcttgggttaaagctaggagatgagccaaggccttctaaccccacaaagctgagctcccagtctgcctgactgcctcacacaacaaggggcagttcctccaggtgactgtcctgtcttcttaaggaaaataaaatgatgagatgaaggccagcttcagatagatcagcacagtttatgctgggcaggtggagctctgtgtttctttgaagggtgggttgtttggataattttgcatgtatcgtgtttccagaaatgtgtagtctaacattaggaagttaaatacagattttttcaaaaattatatattttcaattgattggggtggtaaattataaagttgctatggatgttgccaagctgtattctgtttacagtggataattgtgtctttctctaggcatgtcaacatcgctctaattcagagataatctgttgtaccactccttccctgcaacagctgaatctgcaactccccctgaaaaccaaagcctttttcatgttagatgggatcctttccaaatactttgatctcatttatgtacataatcctgtgtttaagccttttgaaaagccagtgatgatctcaatgggcaatgaaaatgtactggaaattaaggtaagaaatgctttaaacactgtcttaaatcatcagctcaaacttaattgacttcatagctatgtgaatacaattgttgtacttggccattgtatcttatacaacaccagcaaatatataaactctgaaaaacaaatctttttggcataaaactaaaagataagaataaccgtggactgcattttaatgaagcattaaaaaaccctttcttgtgtatgtattaaaacgtagcaaatgtgggacacaaattatccattaaagaggatccgcgtcatgcattatcttgctgatgttatacatttccccggacatgttacctaaatgtgctcattataagataaaacataagagctgtgaaagtaaatgcatcaattgtatctccgttcttccttgtaatacttggaattttgtatctgggtatggtcatctctaagctaatttgtaaatggaactagatatctgccaccttaggaacatattagcttctaaatgtaatttaatagagaataacagatcatcttttctaaagcaagcctgttgcaaacaaagaacactaagacccagaaaggttaagtgattgacaagtgacaaaatagtggcagaataataaagactagagtgcagcttttttatgtcccttcagtagtttctacttcaaataataacacaggcaaaatgctcaagacttgaattattcatagctccagtcactagaaacagcaaaatatttatccttcaacatgttgttaaaacatttagaattttttttcctgaaagatgatctgaatgcaaatatgaacaaacataaagcaataggatagtctttatttggttgtaatataggctttcatgggtcatctccatctaagtaataatatgtttccattgaaatttttctgactttttcaacaaaaatttaactgcagcccaacttatgcatatgttcacgttcatacaagtttactaacctcattattgtgttttgtacaataattaagcaagcccagcataaaattgaatggaagcccgcttcaatgaacagtgtgtttacaaaagcaaagttctttcatctgcttctttaattagttttagaaagggagaaataagcttttatcacttctttttttttaataaaactaatctagtgtgaccttttgctttcaacaattactgtgtttgccatttgaaagattccatttggtttttcttgatgataacaaaggtttatgtgcaaatagttttacactcacagaaactctatttttctgttcctgtatctatgatgaagggattagagataaacggttctttatctacccttccaagcacagtctttatggaagagaaaacttctctttccataaattaaatacccattattcaacatcctacaaaattgttggaccaagaaaaacataatttggcatcatcctcggcctgtcaatggtattcccaacatggcgaaagggtcttctagagactggcaaaaaacactttattttcttgcctatatatggaataactctttctctaacaagtgtatagcacctgccacgtgacagaatagtaatctagtgggagcagtggcaattcagggagattattttagtatcatggttcaatattttttcatacttcatttttcttatgtatgagaggaaagcaaaggcataagagaatatttgttgtgtcagcaatctaactctttatcaatacgttaagttgatcacattaaaacttctacctctcagccaggcacggtagctcatacctgtaatcccagcactttgggaggccaaggcgggtgaatcacttgagatcaggagttcaagaccagcctggccaaaatggtgaaaccccatctccactaaaaatacaaaaattagctgggcatggtggtgggtgcctgtaatcccagctactcaggaggctgagggacggaggtgacctgagtcctgaaggcggaggttgcagtgagccaagatggcaccactgcactccagcctgggagacagagcaaaaaaaaaaaaaaaaaaaaaaccacgtacttcatcaatgaaagtgttctggagagaatcatgtgtttagaatgagatatgctctttattgccaggaagatttcatgctcctcatgcagccatgcatgcaagagttcctagggtgaaaagagattgtgatcattccctgccctagttgtgagagtccctcaattcatagtaagcccagtgactacaccatgggcaaaagggcgagccaggtttggatgagggaacacaataggggtcaagcataagtcacccctcagaatgaatcctaagccccatggatggagaaggaagtttttggccaaggcttcaagtcccccaagagcagtcgtagacagtggtcatcaaaagtaggtacctctttgtgggtatacatgactccccaaatgcctctatcaacaacagctcatgtttgtatggaattttacagttgacactgtactttggcatattttatttcatttgagtctcatgtggacccatgaggttgggaggtcagtgatgattatccccatttatagataggtaaacaaaggtttaggaagattagctgatttgtcttgggtcacccaggaagcaaagagcagaactggggctcacactcaggcttcttgattccaaatttggtcttctgtcactgcatacactaaattacagtatttcttatattaactctcatttaatgtatactaaaataccattatagagacacttttctatcatatgctatttatatatctatgcagttctttagagggaatagctcttaactttttataaatatctaaaaatttattctgtttaaagaaactctgtatttctccctgagtgtcttatttctgactttttatgcatgagcatatcttatgaaaagtagaaaagtattctgtttcatgctggaacaaggactgcctgacattgccttgggggtttatcttattctgcagcatataggaacatatgagaataaagatgcttcaaatgttcaatctggagaagtcaggtcaaacaggaaaaagaagcacaggaagatgagccagggcagggagcggggacttggtctatgacactgtcatcacaggaacaaatgctgagagctcaggaggaggtgaagcatcagtgtgtgggcattggaaggatcaaaaaggaagcatggttttgaaccatcctaatccacctgctgcccagagccagccagatgttgtccttctccctttgaataatttatgtgcaactctacccctcaatctcagtcaaaaccaccatgaactcagttctgagtccagacaggataaaagtgaagggttcttttttcagaggttatttggcccagtgtcgaaacctgttcttattaatggtgctcaacgcttactctcaaactagtatttctttgtgctgcccaggttaatgggcattctgcaaaatatatatatattctttttccagggcagtttcatagtatctaataataaagatagtaaaaaatatattcctgtggtttcatggtacctagtagtaaaggtccccaactagccagcaaagccaccagtttaattttggtttgcccagcttttcccaaatggccagggaagttttccccaaaatgcctattaacatctggtggaactcagttctgaagctgtctgtgaggttcgttgcttggttcctaagttgagggacttgtgtcctctatgtgaagtgtaaatctcaccccctcaccaccacctcactaatttcctactgctgatctccctggactttggaccctcagcctggctgagtcctgctgccaaactgtactgacttgcccagacccagcctgtggccacctgggtgtatgaaaacttgaaggaccctcctctcatagtgttatttttcagatcctacccacttccactcccatctgctcggttctgtaaccatctcagacatgagtccccgggtgtgaatactcaatagaaacatgtcacacctggccagggttggagaggaaagagacatggtacatcctgatatagcacattgggagtaattagttttcatttttgaaatggatccattttgacattgcagtgagaggaagaaatccttactcatctttatattctcagtgactagaactgtgtctaacacacagtagacggtaagtagattttgtgtcaaatggaatttgatttgcttcatgatctagcccctttctggataatagttctccatatgtaaagcagaaatgacaataatacctacttcagggggagtatctttgcaggataatatgagatgattataactaaattgctctatgtctgttggagattaaagatcagaaagctctctctcttttgttgctttatttttaaacccacatattaccattttagtgactgaaatcaccctgaagcagttgaatgacttttatttaataatagttaatattcaataataaatattaatataattaatagtaaaatttctaaatataagttttttagcatctcaataaagctatgtttactttcttttattttaaatgacaaaaattagcctataccttttaaaatttttccttttttgggccccattgttatatagaagtgagctaccagtatcacttttgtaatatctgggactttacgcttctaatatgcatatatatatatatgtgtgtgtgtgtgtgtgtgtgtgtgtgtgtgtatacatatgtgtgtgtgtgtatatatatatatatataactgatagtagttgcttatataagtcactacttaccatgtgtcctttggtatctacatataaaatgagacacagtggatgtgtgatctgtttttgttttagagaagcctttatgcaacaaccagggagatcctaagcctgaaaccataagtattggaaacacaaatgttgtacattcatcccttcccccaaccttagttattatctaagcaagcaagacacattttagaccttttctcataaatcaaatcctacagctctttaatctcttttctttgtcattccctgaattccctccaatatgtggataagggttttatcccccttcagacctagccaacaagttgtcgtttgaagccctaaagtcatctcttagattgctgagcttctgtgttgtgttggcctgtgtggctgacctggttcaatggactacacatactgcttctagaagtatcataaggatagggtttgtctatatccattttatctgaaactccaacatcaggttataaagaagtattttcttcccacttcttttcctagaataataactgcctgaccaatcaatctattgagatccgtatgagaccatgtatgtgaatggagtttgccgagtattaaagattatataaaacaaaggagcagcattttagctattatgggctgctctttgttagtaagaagaatagtaatatgctttgatatatgtcacctcaaaataatagcttgctcaataaataactgtactcattaagtcttgatatgagaaattatacctaggtttgcacttctttcgcaaggctaattattggtttctcaaacaaaacgttgatatttttaaaatgcctgatggtaacttcagttaactaaatatgccacattaactaatttttaaaaaatttttgtgtaactatgtaattgttcaaaataatggaattgtgctctcaaattataatagtcatacagcatctcacataaatttcttttaaaatgaattcacttatgtataggactcaagtgtgcaagaaggatgaaagtaaactacccaactcaaacaaaaaaagaatgtattaatattaacataacataatacagtgttaatacattaacaactatttaacatcagatctctggagatgagacccggacatcagtattttttaaagttttcacggtgattccaaaagcaaagtcaaggctgagaatctctgcattgggcagtgttagatagtgcaacaactgaatctctacattgcgtcttttttgccaaacattgataccccctgaggacaatggtgaggtgatgataggtaagacatcattccacatttaaggatgtgaagcaagaacctctttccttttctttaaggtccaatttgatgcaaaagctatatgctataattcctaactaacacatgccctgaaatggtcatgctcccctttagccatcccaattcccatgaaaattagtatcatagaatcgtgtgccttggcaaacaacatggcctgtgtttgcagtatatttatattcctttgccattgttagcattcctgcagaactgtgaagtgttaacaacctttttttttttttttcctttcagggaaatgatattgaccctgaagcagttaaaggtgaagtgttaaaagttggaaataagagctgtgagaatatacacttacattctgaagccgttttatgcacggtccccaatgacctgctgaaattgaacagcgagctaaatatagaggtgggattcctgcattcctctcatgatgtaaataaggaagccagtgtaattatgttattctcaggcttaaaataaatcattaaagctcatttatgtgtgggttttggctcatcaactcagcctgcattcctagttgttattttagaaatagtgagctttttgccacattgtctccttccccaagcctgggaggtagatctcaaaagttctttctacccacactgcttctccatcacgccacactcttcccaaaatttgctgtaattctcagaagaaataaggatgcatccaagagtgtccttctactgcctcccaccaccccaggaggccagagccagtgttccactgccaaccactgtgatcactaatgcatagagtcccataaataaaggaagatgcatgcatcaaacaaagtaaaataaagattaaactactttacagtaacttttttcgtgtagacaactgaatcaaacaagctagaaccaaagcgagtgatctttttcattctttttttagcagctttattgtgatgtaattcacataccatgcaattcacccattgaaagtgcacagttcaatgggtttcagtatattatattgtcaatttctttgaattgaggtaaaatatacataatgtaatgtttgccattttgaccatttttaaatgtacaattaagttgcattaatttcattcacagtgttgtataaccatcagcattacctaattccagaactttttcgtcaccccaaacagatactctataaccaataagcagcagctccacatacccttctctcccccggctcctgataacttccaatctactctttctctctagaatttgcctattctagatatttcatgtgagtggaatcatacaatatttgtctttttatgtgtggcctattttacttaacataatgtttatccacgtggatgaacataagattcatccacgttgtagcctgtgtcggtacttcattcctttttgtggatgaataatattccattgtatatatcccacatttatccaagagtaagtgatttttaaagggttcctgaagtcttctgaagttataaaatggaaaaacacacaaaaattagaaaatcaaaggctgaatcatgagatcagagttggaatttcagaaggaccataaatcctaaaaatcataaaatgttagagccagaagggacttcaaagatttctgctgtgtatcaaaactgaagtaaaaatattctgagactttattgttccatcataacagtacaattatttacctcttatgggaagtcttctctgccctccaccccaccgtccaggacagaattaatgtcccattgtctctgttgattactgtttagtcatacttctatggtacataccacactgtactggaatcatttatttatatgtctgtctccccttctatacttcagttcctgttttttgtacatctttttatccctaatacctagttacaaatacaaacagctaagtaccacataagtacttaagggatcagtgtcccctaattatttgaacactggagcataattgaggaatctcttattatcctgaaggcagttatgccatttgtagaatggtaataaccagttggtatttgggacccaaagtgctacaacctgtgtagtacaaatatctatcatggctaaatgctgacttttctttatttgtcatttttagtggaagcaagcaatttcttcaaccgtccttggaaaagtaatagttcaaccagatcagaatttcacaggattgattgctggtgttgtctcaatatcaacagcactgttattactacttgggtttttcctgtggctgaaaaagagaaagcaaattaaaggtgcatttttgttactgttcatttttagaagttaccttaagaacacagtcattacagtttaagattgtcgtcgattcttgtgtgctgtcttatatgtagtccataaaacccatgagttctgggcactgggtcaaagtctcctggggcccatgatagccgtctttaacaagctctttctttctctctgttttaagatctgggcagtgaattagttcgctacgatgcaagagtacacactcctcatttggataggcttgtaagtgcccgaagtgtaagcccaactacagaaatggtttcaaatgaatctgtagactaccgagctacttttccagaaggtatatttcagtttattgttctgagaaatacctatacatatacctcagtgggttgtgacattgttgtttatttttggttttgcatttatatttttataaaaacctaaaggaagtatttacctctgccaagtaagtatttgacacaaaattacatggctcttaattttaaaagaacccatgtatatattacattatgattttagagtccataagctctcatttcacaaaaaggttaatttgagcaaaagtaatttgtttatcatctaagtgcaatagtaagaaattgcgaagctctcttttacaatccaggaagagttaagttacaaaatatacttatttaaatgtaagttggaactgctacattttttacctgttgaagcccaaacattgaaattatactgttagtaattcttcgaagtgttttcaatgaactgttagtacacagcctttttcccaccatattctaggacttgaatgtattttgagacttagccaaggaaaaccttcaattatgccatgaaaaaaaggaggggtcaatatcatcagctttgtaaaacactatgcctagtaatgttcaggttaatcagagttttcatgttgttttatttaaatctcctggtaaaagcaaaaggtctgtattgtatcagctccattatctttagaagttacaggatgtgagtcaagtacaagcatttccttggttgaatatttaccattggacaaataaaatgagtcacagatcattgaggatactggaaaagttagaagttgctcatccaaacaagttcaagagcaatgaagcacttaacattttaacattttcaacacttactacctcttatgttttgaagtttatgttatttctatggagatacacatagtaaacattgtctttgccctgattccattcacctttaaaaatccattcgtttaaccgtgtggaaaaatcaaacctagtttattgttttgaaatttagatctatttagtattttatgtgcacatttagtgcatctatttagtattttatatgcacatttcatagttctaatctgagatcattaaaatttacaaattttctttgaaaaaaaaacttacctaatcttctttgaacctccttactcaccaaagctctgtcatcattgctaagaaggttgagtttcacactcttttctccattgagcctgctccttggagacatgaaaagaaaacaggtaaaagagggtcatttagagagaatgagaaaataggtgcacagccaaaacctaatgaagaggcaactgcagagctttcctctctacatctggtggggacagcattctcatcagactttttcacggagacctagagtgctatgtggtgtgacatcagggtggcacactgatggtttcaattggtttctgcacatgttggaatttagctgaagagtcacgttttcatgccaaagggcttttatccatgtctcaccaaggatttccctcaatctgtgcacccttaagcatttagagccctgatctccagatgcaaaggctttaggaagtgagaatgaaagacctgagtttagagaggctgattggcattcccaatcccctggggaaggtttagagaccctgactccttggaattaagggagcaagtacccagctaggctccttccttcctcactcacccaacatttcaggtacttcactgatgttccacatccttctttaaaggttgctcttgtcttttttctggctagtgtctactataactgtaattgatgcccaacgcttttctggaaccacttttggccaagttcatttattattaatcaaactgtccactgtagaaaatactaaaaatgctcaagtgggattaggaatagtcaaggtactaacagcattctttttatgcccttctctcagattctgattctcctgcttatttgcaaacaaatgatacattttggtgctaatgaggaacccccacataaccttctccctgtgttacatactaatacatttcaatactatgcctagtttatcttcatgtcagttgctgtggctatgatgccccctccttgatatgtgtgaattcccagtggaaagagaaagggaaagtggaaatgccctatttggcattaagaaattgactatcagcaccatttcttcccctgaaataaaaaaaaaaattctccttgcaaaagggaactttgcctgaggttcttacagagctttggttataaagatcaacttataaagaatgcttacccctttcatagtgtccttaactaaacaacaaggatggtccactaaccgagatctaacctgccttctctaaacaacagtaacactaaatccagtgccatcactgcacagtggagaatttaccactaatgtgaaaagctttcagttttgggaatatagccattatttatttctaatcatatgtgtatttttcccttggccaggaatccataggttttgcacaatagtaattaattccattaacaaatagtagtgtctcaaaaggcatctttttcattttcttatatttgagctggatttttgtgagacgaggcaattgctcaactacctttgctgctaccactgcttccattcttaaggacatagtatattcaaaaataaaccataagcatggctttttgctattgataaagagagaaatgtctaaggaaatgagggtaaaaagctttcaaaattaatacttagtctacttaaatgaaaatctgtaaacatctaatgaaatgcttgtatatataacttagtatcttttcccaatttattatcatttttatcaaactaattccattataaaagctcttcctgtttcagtccccattaaatgaggttttactgttgttctttaataattttccttcatcttacagatcagtttcctaattcatctcagaacggttcatgccgacaagtgcagtatcctctgacagacatgtcccccatcctaactagtggggactctgatatatccagtccattactgcaaaatactgtccacattgacctcagtgctctaaatccagagctggtccaggcagtgcagcatgtagtgattgggcccagtagcctgattgtgcatttcaatgaagtcataggaagaggtaagtatttccactcagctttttgttaaatacgattttccagtaagcattttatctttggcctttgcagattaggaacttagacaatggtgaaagcaactgacagagcagtgataacaagtgtacttgatttctgttctatagaaatgtagccctgtaaatcatatccgtggggatttgcccttgtgcatggaagcaattggataatcccccaaatatattagaactaaatcacaattcgtcctcgtcctgtgtgtactagcaattatagtttcttcaaaggtgccatttactttcttctaaaactcagggccaggcgcagtggctcacacgtgtaatcccagcactttgggaggccgaggcaggtggatcacctgaggtcaggagttcaaaaccatcctggccaacatggcaaaaccccgtctctactaaaaaaatacaaaaattagccaggcgtggtggcgggtgcctttaatcccaactactggggaggctgaagcaaggagaattgcttgaacccaggaggtggaagttgcagtgagccaaggttgtgccacagcactccagcctgggcagcagagcgagactccatgtcaaaaaaataaatacttataaataaataaatatcactcctttaattttgagtatttttattcaatctctctccagtctttctttaccctgagaacagtgacaaactctatgaagcctggtttatagcagtttgtacactgctggacagcatcagaagacagagaatttatagcattctcctgatctaaagcaacatatatcatctctacaatgcactccaatttctttatacaaagataaatgaatatttgtaataagctagccaaagcagcaataacagctagcataaacagtatttgtggaaatatttagcaggaaaagaaaccaatcaaaaaccgggaaatgaacttcattcttcttgttgtttttttttttctaaaaagcttttacccttaatactaaatggcctctgatcccttttattctatatgtgctgcaagaggttgtacaggcatctgccagtgtgatacaagagaagctgatggcgtgatttcccttatatgaacacaaggccttctcactttcctgtggtagcatccacacattcttctgtcaaacaccccagagcgtaatcctttgtgtgctccttcttccccaagagtggcttcactgttaacaaacatctttccatttctcttcagagtaatatatagttctgtcataggcctataaatcccagtaattgcatcaattttagagtgtgtggactcactaattgtgttctaattctacacatttggaaaactagaattttttatcatgaaaggtactaaaatggcaattatttctcttttgaagttataatcattaacagctctataaatattagctactatgtatttatatgtttttctgcaggagaataggagcactcaaaagcataagttttattttattcttctttgcattagtagagggcagcctaatgcctgacactcacatactaggcactcatggtgtcttggccagctggatgaattaattagtgaatgacttacacagctatcagacatttggcacctctgggggaaattactgccactggataaaaggctaccattgggaaaatgatgtggttaaagccagagagaactggatgaagtgagtcagggtgaatttgcttcatctgggcaactgcctttcagtttctgccaacctggattacgtattaaccagtgactaatggggaaatccttattctataatactaatcctatttttaatggtaacatttttatttcatttcagcttattagaatatagagaacttattttattatagttcttcatgtgggttaactttattttcatattttaaaatactatgtcatcctttaaaaaaatttatttgatgaggccgatgttactcaccttttcagtggttccactgtggttgaatattttattaggttaggctttaatatgagtcatatcatctacaacttattcatgaattaaataatcacattgcttatatccttgggtgaaatgtgttgcatctacatatatatttacaaacacacctacgtacctatagtggtattgttaaaagtattttttaaatgtactcttttgctgtatagaaagaagaaagaataaaatgaagctcataaagggtttgataaataattatttcataattaaatgttacgcagtgctaaccaagttctttcttttgcacagggcattttggttgtgtatatcatgggactttgttggacaatgatggcaagaaaattcactgtgctgtgaaatccttgaacagtaagtggcattttatttaaccatggagtatacttttgtggtttgcaacctaataaatagcttataataaaacgttgatttacactttccccttgtggaaaaatcagctaccactgaaattatgggcctaatcctgaaaatttgttttgttctagacttttattgaactacttcccctgaaatgatccctcagagccctcattagtaagggggtaggagaaatgaggttcttggatgaactgagtatcatttaactataactatgtttggtttataatatttgttttgcaagtgacatttctggaaactattggaagcatgttggcacctacagtagtaatgactcattttacccagaggcattactataattattttttaaccacaacttccattaaaaagataaaaaatgaaataagacaaacaggagaaaactacgctggccaaaaattgaaaaatcataagtatggtaatacctcatttatccacatttttggagagtgaggcattccacatacatgaacttcctaaataaatgaaacctacccctttttaatgctggaacattacttaaaattttagctgttattgagaaaatctttttaagatgaaatgcatactctgtttaagggaatgcttccaaatacaaactaagtctttattggtgaccccaagccataattacagccataaattactatattacacaaacagtgtactccacatacatagtgttcctggctccgcctgtgttgacaggtctcacatgcttgcgttttctactcccatttctcattttctgcttgcaaattgcagcagcctgaaaaatgttaaccagctctactacaaactttatatgggacttaataagctttaagtgcacaaatgaaagattttcctgcaagatactttactgtcacaattatttcagtctttttaaaatataaatcaacatgctaagtagtgttctacatggttaattttgttggaagtctgaccatgagggaaataaatggacagtctttatgaaacctaagtataacctttgcactaagtttataggagacaaactggtggctggttggactctatcttgcaaaagtgggcataggtggtgactggaaggcacagtgcacggtggcatcattcactcagatgtgatgtaaaaagaacactctgcagtcaaaccctcaggacaagatgctaactgtgtggtttaccatttcattgctcttcctatctaaatttgacaaaagtattcactgttccataatgaagttaatgtctccaccactggatttctcaggaatcactgacataggagaagtttcccaatttctgaccgagggaatcatcatgaaagattttagtcatcccaatgtcctctcgctcctgggaatctgcctgcgaagtgaagggtctccgctggtggtcctaccatacatgaaacatggagatcttcgaaatttcattcgaaatgagactcatgtaagttgactgccaagcttactaactggcaaactagctgtaagccagccatcccttcaaaataggcctgctctgagtctttaaaaagctagtagccaaagatgcacatttaaaatgttagcatcattcaaatgcacctcaaagtcttctatcctggtgggaaatagtgacacctggaagggtttcctggagcaatgattcttacttgctctgcaagcaaccttgctctaccttccctctgatagggacatttagtcatctttgcatgtctactatgtgccagaaactgtgcacagcacaggagaagtggaagcagagcaagcctcagcccatatggaatgttaactctacaaggcattgaaaaattaactccagatgcgttccttgctgttccttgtccttgccatccactctcacacctcaggaactttgcacttgtgctccctcagcctggaacactctccccgcaaatagccacgtatctcacttcctcatcttcttcagcttttggccgtaatgccatcttcaacataagccttccctaatctgtttaaaattgcaactgaccacccaccctcatggcttcagactcctcttccctgctctattttcccccatcacacttaactgtcatctgatacatgcatgaagctgcctgaagctgcccaatactatggccatgagccacatgtaaaaggaggctagttcgaactgaaatgtgctgtacggtgtagaatacatcccagattctgaatacttagtattaaaaaaaaaagaaggtgaaatatctcactagtagttgtttatattgattacatgctgaaatattttggattttgggggttgaaaaatacattgtgaaaattaatttcacctgtttctttttacttttgagtatggctactagaaaattttatattacatgtgtgtcttgctttatatttctattgaatagcactgtagtagataataaacaaataaacaatagctatatagatgtatatgtatgcatatatatgtacacacaccctcatcccattagaatggaagctcatgagggtaggatttttgtgtattttgttcactgctgtggctccaacacctaaaacagtgtttagcacatagactcgcagtaaataattgttgaatgaatcagctaagggttacaaaaaaaggttcttagcctcttgcaagtggtagatttttttcttgacatttatgccaggacctaaaagtcaccaggccaggaccagggagggtgggaataagaatctcaagaactgaattcatagaaggcctcaagctccgtctcggttcctgctctccaagtctctgtgggaggtaatgaagttgatcaaaagcaactttataaatatggggtcaaattatcagagaaaataagctctaggagagtaatgagatattactcagccaaaagaataaaacattccctggcagtgaacttttgcagataaggcgaattgaccttacaaagcacacagctgccctgacagaccccactttcccacttcaacttttgttattaccctgatggattaatgtggctggaggtgctaccttctctagggtactgttaccccaggattaaagcatgatagagatttcctgttatccagaacggaatagtgccatggccttttttaatccaaggagctgatactgagagcaaccacaaacccagatgtgtcttaaagagaaacctaaaaccaggaactggcctttctctatgctgtgtgcattgagtggggctacagcccttttgcagggtccccactgactacatcttgcactgacaaactcctcagtgactgttgaaggggaataccccattcctgattgccagccagtgacatcaccagacttgacagctgagtggtttggggtgatttctttctgagcctcctctattcactgtgcttctgatgttctaacatcttgggccttactaaccctggaggaactgtccctcccaaggctagctaattcctgcaaatagtaaacagcttgccttcaaagcatacctgtcatgtgcaaaccaaccaatccagagcccttatctaacctcctcctttatcaggctcttacactttgggctactatccacctgccctaatcaccccagggcccagttccagacaactagaactatcctcggagcctgctgaaatactccagattggccagctccaaacctgcttaccctgccttaccagtttcttcccagggaaactgcaatgaaggctcttgctcatgtttttcccctctctctctctgcctctagagcccagggcttcccccatgtgaccctgcatgacagggtgtgcctcctcctcttgcaaactgtgaatagcaaactatcttttcaatggcagttgtctcctgttctgttggcctcatcatacctggaaaataataaaactacattttaaaacacctccattttcccatctggaaaatggagcctgtaacacctgcctgacagaagtgtagaagtagctgtaatttatgaaaacaattagcctggtgtgttgcatacaataaatacttaacaaatggttgatctgtcaatggggcacactttttgttgttgttgttttgttttttgtttttggagacaaggtctctgtcacccaggctggagtgcagtggcacagtcatagtgcactgcagtatccaactcctgggctcaagcaatcctccttcctcagactcctaagcagctgggactataggtgcacaccaccacaccaggctaatttttttgtgggcggtggatgggagtaaagacaggatctcactgtgttgcccaggctgatctcaaactcctggcctcaagccatcctctcgccttggcctctcaaagttctgggattacaggcttgagccattaagaccaaactaatttttgagacaagataattttttataaataaatatttcagaattctaaggtcaaaattagaacagtagatgcttagtttatgcttttctaactctctttgactgcagaatccaactgtaaaagatcttattggctttggtcttcaagtagccaaaggcatgaaatatcttgcaagcaaaaagtttgtccacagagacttggctgcaagaaactgtatgtaagtatcagaatctctgtgccacaatccaaattaagtgacaaggaggaatctgtttcccactgttcaatgctagttaagctgttttctcttcttatgcaaaagtcctttatttctgttacaatcttaaatcgatgtgtaagccctggggatgtgggtgggactttcagactttatccaacagagaatttaaaaggattctccatagggggtcttaaacagctgttgtgtacttttgcttttctcagtccttccctccagtagctctcaatgttgtggtttcacactgcattagtgttggggagggagaatttgatcttcagcatttgacagtgaaaaggagagggctgggaacacaaataccaacatattgcaacttcccaagagtggatttgaagccagcctgcagaagccctaccaaaaatggtatttggcaatgaatatacaaagaactttatttgtgtctggctgcctggctatgtaatacaacagtcaacagtttgtaattgagttcatgttttcccttgcatagcactgattcatgacttatggtatgtgtgaatgaaaaagggtgtgctattaatttcctaccttggttttggtcactgtaacaacataaaagccagcttaaacagaggatgcatagccccagatagcggaaattgatttttgttgaacttcgctgtttttcttagatgctttactgtgtatcctagttctctattacctcagtggtgggatatatgagttttgtgtgctaacctagctcatttaagaatgaaaaagtaaagtatcagtcccctgtcatgctctcccataaaactgagtatcgctaatcagttgacaagcgaagattggtgattgcttgggtagttaattagcatacttcatttagcaaccaaagtaaacccacaggggagacagccttactactgcagatctacattaaagcaaaaaggactttcttatgccatacaattcatgatctctttcctcagcctgttgaattggcaatgtcaatgtcaagcatttttattcaagaattctgttgtaatttagtgttagtcaatagaggccagatgaaatacttccttcagaagttatggatttcaaatactgaagccacttgtttaatctgtagatattcagcatcattgtaaattattctatttcagccacgggtaataatttttgtcctttctgtaggctggatgaaaaattcacagtcaaggttgctgattttggtcttgccagagacatgtatgataaagaatactatagtgtacacaacaaaacaggtgcaaagctgccagtgaagtggatggctttggaaagtctgcaaactcaaaagtttaccaccaagtcagatgtggtaatgtattggttatctctgagtttctcctcttttactttcatatccaactttttttgaagttttatcactacttaattttttaaaaaaattcaacaccaccaattccagttttcttcatatgtaaaaatggacttgtctgatacgtacacattgtatattttcataaattcactcatttgttcaaaaatatttgttgagtggggcaacataccagctccttaggaagcccagagctgaaccaggcatgaaccctgtcggccaagaactttggctcagaagggaagagatgagatggtcaacaatgactgtgacacaggtggcctggaatgggccctgattctcatagccccaggcgagcaagaattccacatcaagaaatctggaagctgtaactgaggcagtctagcagtgagggcatgatccctgggcctagctagtaaagtgccttcccttatctgcaaaggccatccttcttgcgcagaacaagctctcaaaaggcatgcacctgagtgctgaggctgggagaaatactcacctgggcagccagattcaccacattccccttccaccatatggagaagtggcatttgaattgggttaaaggacagcaggtttggagttgggcagctgggcaatggaaataccgatccaggtgtggcagaagagcaggaaagtataagcacctgtaaagttataaggaaacagtacttagttatttggcaagaacagaacacagagagggaagttatgagaataaatggagaaaaatatacttatactaggtcatagagttccttgaaaactgaactagagagtatggaatttattctctggtaatgtggaaacaaaaaagtaatcagattagactgcaatctttcatcattgtattagtccgttctcacactgctataaagaaatactgagcctgggtaacttataaaaagagatttaattggctcacagttctgcagactctacaggaagcatggctggagaggcctcagggagcttttacccatagcagaaggcaaaataggagcaggcattttacatggcaggagcaggaccaacggggctgtgggaagtgccatgcacttttaaacaaccagatctcctgagaactctatcacaagaacagcaccaaaggaagaaatctgcccccatgatccaatcacctccaaccacgcccctccctcagcattggggattacaattttacatgagagttgggtgggaacacagagtcaaaccatatcattccgccctagttcctcccaaatctcacgtccttctcacatttcaaaacacaatcatgccttcccaacagtcccccaaaatcttaactcattccaacatcagctaaaaagtccaagtccaaagtctcatctgagataaggcaagtcccttctgcctatgagcctgtaaaataaaaaaacaagttagttgcttacaagatacaacgggggtacaggcattgggtgaatgctcccattccaaacgggagaaattggccaaagcaaaggggctccaggccctacacaagtccgaggccctatgcaagtccaaaacccagcaaggcagttattaaatcttaaagctccaaaataatttttttgactccatgtctcatatccagggcacgctgatgcaagggatgggctcccaaggccttgggcagctctgctcctgtggctctacagggctcagccccatggctgctttcatcggctggcattgagtgcctgcagcttttccaggcacacggtgcaaactgtcagtggatctacctttctggggtctagaggatggtggccctcttctcacagccccacctggcaaagccccagcactaaggggaggtctcagggagctttttacccatggcagaaggcaaagcaggagcaggcatcttgcatggcaggagcaggaccaagtggggggagggggagcatcttatatggcaggagcaggaccaaggtggtgacaagctttcaccaaggggagaggtgccacacacttttaaacaaccagatctccgtagaattctatcacgagaacagcaccaaagggagaaatctacctccatgatgcagtcacctcccaccaggcctcagctcccacactggggattataattcaacatgagatttgaatggggacacaaatccaaaccatatcaatcattctccaagacaacttgaaaggagtagaagcaggaagatgaagtgagaagtggaacttgaaataagacacaatgagaatggaaaggaagagatgaaaggaggagcatctcagaggtagaatcagaagtatttaccaaggaattgataaaaagtcaaagattagcaaagatatatgctcatgcaataacacatatatgaagcacagaagcaaaagctggactcagaacaaaaatagcaagttgagccttaaacacactgagtttgccttgggagtagaatgtccaggcagagaagtccatcaggcaattgaaaatgtgaatctgcaacttgtaaaaaatgtattattcagcctgggctgtcatacaatagaccacagactggttggcttaaacaacaaaaatgtatttctaaccattctgaaggctagaagtccaagatcaggatgtcagcatggttgggctctattgagggctctcttcctggcctatagatggccaccttcttgctgtgtcctcacatggctaaaagaataagagtcagttctccagtatctcttcttagaagggcactaatcccagcatgaatgcccaccctcatgaccttgtctaaactgaattacctctaaatggccccatcattaaacattgtcacagtggggcttagagcttcaacatatgaatttccggggaacacaattcagtccatagcaggggtcaaggctgggaatatgcttttgagagtccaaaagcaattattcagtagtccaaaagcaattattcaactacatatataaagtgaaagagaaaagcagtgaggtaagggacccagaagcaaagaccaccatgaaagtcagagtaagagaaagtttcaaggagaaattggatgctcaacagagtccactgctactcagtacaccagaagggtcttggaagctgagtaacttgagtgatttggaggtctagagtgtgcttaggagcacaggtgttgaatggaatggagagtacacttattctattcacatgttgtaagtcagaggactgtgatgtctgaagatagagaaacatttgatgtttcagtccttaaggatgacaactaaaaaaggaaaatgtgcaaacaaagtagtcagaaaataatgttcatgggggacatgcacttgaagagaaagggttggtagcttttgagagatgatgggtcagagatctgagtgtggcatgggaagcaagaagtcatctcatccacctctctgtgaatcagcaagagggagaggtgtgacccctattggcaagagttgcaaagaaattgtgacttcaactgaaagctgagtttcagttcctgtgaggaggtaggggaactattagagaataagacgaggtgactgggagtttgttttcaatgagtaagtaggtcataggtcatggtggaggaccaggacttcagcatgcatgagattggtaagagaaagtgatagtgccatgtagagcttaatgcctgggattttgatcctgaaagattctgaaagaggtgaaagaagtgggtgctagagagggagactggggacatgttagtgacagtggcaggtgaaggcaaaagatagggagaattaacccatcctccaagaacatactgttcattcagacttgagggttagtctgccattaagaagccagagccaacccttacaactcaataataagactgtcttagtcgttttgtgctgctataacacaataccacaaattgggggatttataatgaacagaaatgtatttggcccacagttctggaggccaggaagtccaagatcaaggggccacatgtgctgaaggtcttcttgctgtgtcataacatggtggaaggcatcacatgggtgtgagagagtgcaagagagagcaagaggtgaacagattctctaacaaacccccttccacaataatgaactgactcccaagataatgacattaattcacccatgagagtagagcctcatgacctaattacctcttaaagatccctcctctgaacactgttgcattgggaggggattaagtgtccaacacatgaactttgggggacacattcaaaccatagcaaaggcaatattactcaatttttttaagtaagcagaagatttgaatagacattttaccaaagagacgtaagaatagctagctaatgagcacatgaaatgaaacatatgcccacatgaagatttgtacatgaatgatcacagtagttttcttcataatagccaaaaaccagaagcaatcttaatgtccatcaacgggtgaatggataaaaaaaaaatgtggtgtgtccatacaatggactaaaccattcatcaacataaaggaattactgatgcctactacagcatgataaacctcagaaacattatgttaagtgaaaaaaaggcagataaaaaaattacatgttgaatggttccatttatatgaaatttctagaaagaggcagaactacagagtcagaaaacaaatcagtggttgcctggggccaagagaaggagtgaagataaaccacaaatggacatgagggaattttctggaatgttgagatgatctaaaactggactgtgatgatatgatagctgcacgtctatataaatttactaaacatcatttaatcactttaatttactaaacatcaccaatcacttaaaattggtgagttttatgatctataaattatacctcaacaaagctgatttataaaaaaagagcctgatgaaattttggatgtttagggcaagtgttgggattctaagcttcttgacagccacatacatgcaacaatacccccacctccccaacaaacacacacagacagcacagaggccaaggcttccaccatagccacagtcactcagatacttgactggaaatgtacatagatttctgcagataggatggtgctatttctttctcactctcatcgaaagacactattttgtgctacataaaggctgaacctgaataatctgtacataatgctgctttgggaaatggttactgattgcatggataaatttgcacagtgttttacttccaggacagcgcaatcttgaatgttgacatggaacatttccaaaagcatgcaatgagctatgtgtatgttgaaacctgcgaccaaaaacttgcctgcttgtagattgggttttctttctagaaaatgcccaaatggagtttggctaaaatctgaatactctttaagtccattcaaacaaaatcggagtgtcactacactggaaatcactcacaccctcctctgaacccttttgcaatgggtgttgtaattgtattatacgttgtttcacacttaatacaagttcttccattaaactgtgtattgacttccttgttctcagcccttatctgcctcatctttctgaagtgtttaacattattgtaaccctcatttttcttgaaatttcctcttcctttggtttctgggacactgaaacttccagttttcctcctgcttctaggttgttttctttatcctcaatggcttctcttccttctgtcttccttctctcagatgtagctgtctcccaggatttttgtctttaggggtcatcctccaccaacagttggaaccattcccatcaataaccacctttgattctctctacctggatgtcatcatcagtgtcacaaatttaccatgttcagaatcaaactctttcctgccaaaccctcaatttctcacctcctggctttgattaatggcatcaccattgtgtaatttacccactcctcattcttttcagtgttcggtttttcaggttttgacaaatgcatgcagttgtgtaaccaccaccccaacaatcaggacatagaacagttctatcatctcagaaaatttccttatgctcctttgtagtcaacctctaccctatccccaggacctggaaatcagaaaaccagatttattttctgtctctagagttttactttttctaaaatgtcatataaatggaatcatgcagtcagtagtcttatgagtctgtctccttttacttcgcatattacatttgagagccatccatgttgtcgtatcagtagtagtaacgtatcagtaattcattcctttcttattgtggcaaaaaaatacataaaatttaccatctgaacgatttttattttattttaagttccagggtacatgtgcaagatgtgcagatttgttacgtaggtaaacgtgtgccatggtggtttgctgcacctatcaacccatcacctgggtattaagctcggcatgcattagctgcttttcctgatgctcctcccctccctcgataggccccagtgtgtgttgttcccttccctgtgttcatgtgctctcattgttcagctcccacttagtgagaacttgcggtatttggttttctgttcctgcgttagtttgctaaggataacagcttccagcttcatccatgtccctgcaaaagacatgatcttgttcctttttatggctgcatacaaccatttttaaatacacagtacagtattgttaactatgtgaacattgttgtgcaatagattcctagaactttttcatcttagcaaaactgaaactctatatccattaaacaattctctctctcccccaggccctggcaaccacaattctactttgtctaagagtttgactacttcagatacctcatataagtggaatcatgcagtatttgtctttttaggaccgacttatttcatttagcaaaatattctcaagcttcatccatgttctagtatatgacaagatttccttctttttaaaggcagaataatattccattgtacatatatgccacattttctttatccattcatctgtcaatggacatttaggtttcttatacctcttggctattatgaatagtgccgcagtggccatggatgtaaaaattctctttgagatcctttttttcaattcttttgtatatacacacagagacaggattgctggatcatatggtaattttattttcaaatttttggggacctctctactgttttccacagcagagtagttcatctctttttatttttgagtagtattccatcgtacagatgtaccacattttatttatccattcaccagttaaagaacatttggggccaggagaggtggctcacgcctgtaatcccagcactttgggaggccgaggagggcagatcacttgatgttaggagttcgagaccagcctagccaacatggtaaaaccccatctccactaaaaatacaaaaaattagccgggagtggtggcacatgcctgtaatcccaactattcaggaggctgcggcgggacagttgcttgaaccctggatgcagaggttgcagtgagctgagatcatgccactgtactccagcctggatgacagagtgagacccgtctcaaaaataataataataaagaacatttgagttctttccattttcaggcaattacttatacataattgtaatggctatgacatttgcttgaaggtttttctgtgaacgtaatttttatttctcttgggtgaatatctaggtgtaagagtaactaactgggttgtaagataagtgtacattcaactttatgagaaactgccaactatttttcaaagtggctgtatcattttatgtccccaccagcgatccataagagttccagttgttcagcatcctctcccgcacttgacattgtcagctttctgattgttagtcattctaattggttgtagtgctgtctcattttctttttaatctttatttcccaatggctagtgatgtcgagcctcttttcatgagcttatttgccatccttatatcacctttagtaaagtgtctactcaaatcttttgcctatttttaagtatttattaataatattaatttagttagggtttattttattggcttgtttttgtttcttattgaattgttcgagttctctgtatattgtggatacaagcatatcttatgcgatacacttttgccaatgcatttttttttcttttgggacgaagtctcactctgtcacccagcctgaagtgcagtggtgcaatcttggctcactgctacctctgcttcttgggttcaagtgattcttttacctcagcctcgccagtagctgggattgcaggcatgagccaccatgcccagctaatttttgtatttttagtagagacagggtttcaccatgttggccaggctcctgacttcaagtgatccgcctgccttggcctcccaaagtgctgggatcacaggcatgagccaccggtgacacttggcccacaaatgcatttttctagtctgtggattaccttttcatttatttaatggtatccttcaaaaagcaaaagtttttgattttgttgaaaattttatcagtttaccaattgataaaactttatcaatttattttttttcttttatcaatcctggtgttgatgttgtatctccatgcatctactcttgaatgctcagatttgcctatcatccttccttgctcacttacctcagtagcaaccctgtctatcacttttcatagcttacaaccatctttcacatttaatcatttctttgatcatcaccttcagtaaagttaggccagatattctccagatgagcttattgctggtgctcaaatgctcaaaatggcttgaccaatgccatacagtaagcacggatgatagcgctctcatggcttgaaactaaaactgacttgtttcctaatgcacatgaattgtacacctccctcccctcacccccgaccccccctcaaccgacagacacacacacacacacacacacacacacacacacacacacacacaccagcttctctcttcttggtcatcatcctaatcagcatcacctcctctttcactgtccctcccctcaccctgctgtcagccccacaatgctttcaggggagtgtggagtgcagacaatacaatgctcttcctggaaaccttcttcctcttacctccctgtcccgtgagtcctccagctattttctgatacccagttattgcccacgtcctttaattccttggaaaattacccaactccatcccccttttatgtgactttgtctccagacaaatctacatgtagcgtagactgtcagatagggagacctgatcacagaactttggcttcctcatcctaaaataaaaccaattacatcacaggattgtaaccaagtacaatccattataaggattaaataagatgttttgtaaaggatataatgcctatgcatgaatcattatatgacaaatacactctttcactaccttaattccagagaaaagcctcataggcttccgtattgtaggtatgcaggagtgtccctcacctattcttattcagaaacctcctaactggcctccatattgtgaatcagcttctcctttctgttctaagcttggcgcttacagatgccatctccctgagcacaactcagaactcagccatgtcccattgatttcagtctaacgcactttctttttttttttttttgagacggagtctcactctatcgcccaagctggagtgcaggggcgcgatctcagctcactgcaacttccacctcccaggttcaagcgattgtcctgcttcagcctcccaagtagctgggattacaggtgcacaccaccatgcctggctaatttttgtatttttagtagagacagggtttcaccatgttggccaggctggtcccgaactcttgacctcaagtgatctgcccacccccgcctcccaaagtgctgggattacagatgtgaaccaccttgtcccgtcctgtctaacccactttcaacatttaaaaacctccacagcacagtcccatttcaatcttatgggtccctaatcccttcccctactccaacatgtcaagcaacgtgaactattatactttatggtttaataagaacacatatgcagccaggcgccgtggctcatgcctgtaatcccagcactttgggaggccaaggagggtggatcacctgaggtcaggagttagagaccagcctggccaacatggagaaaccccgtctctactaaaaatacaaaaattagcctggcatggtggcaggcgcctataatcccagctactcaggaggctgaggcaggagaatcgcttgaacccgggaggaagaggttgcagtacaccaagattgcaccacttcactccagcctgggcaaaagagcgaaactccatctcaaaaaataaaaaaggaaagaaagaacacatgtgtactgttactcctggccccaccccctccacccaaaactctccctctgccctcatattacctgcacctataaaacaaagtctccctgttcctcaagacccaccttactgtcactctcttcctgcagcctttctcagtaccctactattatctctttgacttttggcaacctttgtacctctttgatattactgctctatattacagctattatcttattgtcctgtgtggcagttatctgctcaattctcttaaccctgttcattcagccctgggacctatctagtaacttgaacagtaacctactcgtatgtgatcaagggtcaattgatacttgttaaattgattttaaatgttaatgcatattctgggacttgaaagttaacacgatgatgttgtcagaagtgattgttgattgttaagattttcagactttgaaaacttctactttgcaaagctgaattagacagcaaagttctgtagctccctcctggcaaggggtttgagttttctgttgggatcaaggcagtcagcagccatcaagggttcttgcacttgggcaaagaagtcattaatggtaatttgtatcagcaattacagcatctacctcatttctttctttcagtcgcagcgttcaaaggcaggctttattctccttcttgctgggtactgcaagctacacttgcctctcagttttatgtcttcctactccagctgtctggtgtggattttccttctgctccaagcttccttcatttcttcctccttatgcttcctactcttagagtggcctggaagtgttgctgggccagaactgcccccctgggtcctgtccacaggggcggcctctgcccatgctgactctcctcgtgtcattcttgcatgggcacatgtccagggggagataatatgtatgacctggtctatcctgagcacagtgttttaaatcaagaaattgcatgtttattgaagttcagtagaccaaacaagacctaagggtcaggaactcttaaatgtttatcccagtgtggactcagatgtattggggaattttagcaagtcacttaacctctccgtgtccctgtgatcttcctatatagtactgatacggctattttatatgaatctagtactttcacatcttcatgtgacagttttattgaaattaattttcaatagagaaacttgttgccttgcagttttttttatttctgatttttaatatgtatttttacttatgttgatttagaccttcccatttaatagtaacctttcaatgtggttacatttcttaaagagtatttatgttcagtttgaaaccacacaaatttaaattttgggaggctttcttcttcttttacaagtaatgtaaaattgtagtgaagctattggaaaagaaaaggatagaaacatgttagtgctttgacacagcgggagagaattttggaagagatattctaccaactacagatggaatcttcatcatcatgtagacttcagatattcttttagaaaactttacatttacttataatctaaaccttacttgtttaaacaagtcatgaaatgtatagcttaataattgcctttaagaaaattgttgcccaaaacagaaaccgtattgagtatgtaaagccaagtttagttaccaagacctactgatttcctttcatatatgtatggtcacatctctcacctcatctgtcctgtttcttgttttactagtggtcctttggcgtgctcctctgggagctgatgacaagaggagccccaccttatcctgacgtaaacacctttgatataactgtttacttgttgcaagggagaagactcctacaacccgaatactgcccagaccccttgtaagtagtctttctgtacctcttacgttctttacttttacagaaatgcctgccttcaaagggtctcttacagcatgtctttctttttggaacagatatgaagtaatgctaaaatgctggcaccctaaagccgaaatgcgcccatccttttctgaactggtgtcccggatatcagcgatcttctctactttcattggggagcactatgtccatgtgaacgctacttatgtgaacgtaaaatgtgtcgctccgtatccttctctgttgtcatcagaagataacgctgatgatgaggtggacacacgaccagcctccttctgggagacatcatagtgctagtactatgtcaaagcaacagtccacactttgtccaatggttttttcactgcctgacctttaaaaggccatcgatattctttgctcttgccaaaattgcactattataggacttgtattgttatttaaattactggattctaaggaatttcttatctgacagagcatcagaaccagaggcttggtcccacaggccacggaccaatggcctgcagccgtgacaacactcctgtcatattggagtccaaaacttgaattctgggttgaattttttaaaaatcaggtaccacttgatttcatatgggaaattgaagcaggaaatattgagggcttcttgatcacagaaaactcagaagagatagtaatgctcaggacaggagcggcagccccagaacaggccactcatttagaattctagtgtttcaaaacacttttgtgtgttgtatggtcaataacatttttcattactgatggtgtcattcacccattaggtaaacattcccttttaaatgtttgtttgttttttgagacaggatctcactctgttgccagggctgtagtgcagtggtgtgatcatagctcactgcaacctccacctcccaggctcaagcctcccgaatagctgggactacaggcgcacaccaccatccccggctaatttttgtattttttgtagagacggggttttgccatgttgccaaggctggtttcaaactcctggactcaagaaatccacccacctcagcctcccaaagtgctaggattacaggcatgagccactgcgcccagcccttataaatttttgtatagacattcctttggttggaagaatatttataggcaatacagtcaaagtttcaaaatagcatcacacaaaacatgtttataaatgaacaggatgtaatgtacatagatgacattaagaaaatttgtatgaaataatttagtcatcatgaaatatttagttgtcatataaaaacccactgtttgagaatgatgctactctgatctaatgaatgtgaacatgtagatgttttgtgtgtatttttttaaatgaaaactcaaaataagacaagtaatttgttgataaatatttttaaagataactcagcatgtttgtaaagcaggatacattttactaaaaggttcattggttccaatcacagctcataggtagagcaaagaaagggtggatggattgaaaagattagcctctgtctcggtggcaggttcccacctcgcaagcaattggaaacaaaacttttggggagttttattttgcattagggtgtgttttatgttaagcaaaacatactttagaaacaaatgaaaaaggcaattgaaaatcccagctatttcacctagatggaatagccaccctgagcagaactttgtgatgcttcattctgtggaattttgtgcttgctactgtatagtgcatgtggtgtaggttactctaactggttttgtcgacgtaaacatttaaagtgttatattttttataaaaatgtttatttttaatgatatgagaaaaattttgttaggccacaaaaacactgcactgtgaacattttagaaaaggtatgtcagactgggattaatgacagcatgattttcaatgactgtaaattgcgataaggaaatgtactgattgccaatacaccccaccctcattacatcatcaggacttgaagccaagggttaacccagcaagctacaaagagggtgtgtcacactgaaactcaatagttgagtttggctgttgttgcaggaaaatgattataactaaaagctctctgatagtgcagagacttaccagaagacacaaggaattgtactgaagagctattacaatccaaatattgccgtttcataaatgtaataagtaatactaattcacagagtattgtaaatggtggatgacaaaagaaaatctgctctgtggaaagaaagaactgtctctaccagggtcaagagcatgaacgcatcaatagaaagaactcggggaaacatcccatcaacaggactacacacttgtatatacattcttgagaacactgcaatgtgaaaatcacgtttgctatttataaacttgtccttagattaatgtgtctggacagattgtgggagtaagtgattcttctaagaattagatacttgtcactgcctatacctgcagctgaactgaatggtacttcgtatgttaatagttgttctgataaatcatgcaattaaagtaaagtgatgcaacatcttgtatactgatagtggttattgccagtcatgcttgattacctgcatttgcataatgatagaggaagcctaagatggatttcacctggctgcatagagctcatccatgtaggagagccttagtcaagtgaatgctgaggaagtagtaaaacagcatgcatccccgaatctcaggaagtctctgtctttccaagggtttggtctaagttgctgattacctggatttttctgacgatctttcaactgctagagcatctggttcctgttttagcatggtgctcttctccagcaaggtgtgtccttagactagaagacacaaaaatggagcagcagccacaccattggcgcacagatacctaggtgtgggttggagagagaggccttcttgccccatcaaaactactctttatctacacaggtgcccacccttttacccccagttaccagagaaattaccttcaggttatctccatgtatattcttgtaatggtaagggaattcaaaggtgataatttcagccatctaagaattgtgtgacacattgggggtaatctaattttaaaagaacccaatttaaaataatgcctacaaaatacaatggacactgatcctttactgggagataattcaacccccgctcacggccaaactctctcccactcaaaagatgcatttccccagaaagttcaatccaactctctcccataaggagaacaacctgtcatctttacatctctagaatccggcacttagtagattctcaaataattgctgaactgaaacagcattttcttattccccatcactttatttatttatttatttatttatttatttatttatttttgagacagggtcccactctggcccccccagctggagtgcagtggcatgatcttggctcactgcaacctccacctcctgggttcaagccattctcctgcctcagcctcctgagtagctggaattacaggcacacgccatcacgcccagctgatttttgtattttagtagagacggggtctcgccatgttggccaggctggtctcaaactcctggcctcaagtgatccacctgcctcagcctcccaaagtgctgggattacaggcgtgagccaccacacccagcctactttaaaccaccatggacagagttattgcctatgtagctcccatgatgtttggagaacactaatatggagaatgcagacttttctggggaaagagaaatagaaagatagacctttaagaagtttggcttggtgctacgcatttttaattatcacagggttttcgcttcacgatataagcatcaattatatttttgctcgctgacctacacagtggattccatctttaaagaaatagggagaagggatatataacgcgtagaaatacatcaaatgcttgaatgctgacatctggcattgttaatctacctgatttagttcagaaaatgagttagcattatataaaagaaattgattagtattttatttaactcaacgaatatttatcaagcacctatatatgtcagacactgctaggtaatggggatataaaaataaacagtccctctcaccccaaggaatttgatgaaacagacaaaattacataattaatgaatattaaaaattattcatttcttagatttgtgagttgtcttgaagagacaccacagtttaaacatacacaaagtgcaggctcctgggcaacagaccaagccctaactcagattgggcaacatattggacttctctaaacctgtgttctcatctgtcaaatacattaatcatggttacccccacaaagttgtttgaggactttaaaaaaaagtgtataaaggcacctggcacaccatagttgttcaataatcataatatcattattatctttagtcttagacaataaaagcccatgtataggtagccttagttggctaaagggaaatgaggcttggaggggcattacagatgtttaaatccaaattcttaccccattctttttgtttttgttttttgtttgttttttggtttttgttgttgtttgttttgttttgtttttgagacagagtctcactctgttgcccaggctggagtgcagtggcatgatctttgctcactgcaacctccacctcctgggttcaagcgattctcctgcctcagcctcctgagtagctgggattagaggtgtccaccaccacaacagctaatttttgtatttttagtagaaacggggtttcaccatgttggccaggctggtcttgaactcctgacctcaggggatctgcccgcctcaggctcccaaagttctgagattacaggcatgagccaccatgcccagccaacttcttaccccattcttcacctcacacctgctttatatacagtagaaacagctgtgattctgcctcatcctgcatatgacagtgagggtgagagaggagaaaggtgacaagacagtggcactggcaagagaactccctcacttctttctctacactccccactatcactttaattacttctcctgtgacagattccttttttctgttttagcctttagacctggaatacacaacagacatggaagagaacattctgtctaaatgacaggcatgttgcatgaaggtgcaagaataagagccatagtcttcagtattggtgtctagaaattattattgttcctcatttttgctcaaatgttaatagatggttaatgatcattcaggttgaagaaaaagtaaactaagtacagtattgttttagttatgtgctatgtgtttgaagatgaggaatacatgactagacacacatagcaagttacacaggcacacatgactcactgttgtagcacttcagacagtttcaagacacagagaggtatgcagacgttatgccccaaaggaagaaatgcttattgctgtttttctttttcatatttgaggggttctttcaggactatctcaattccttatctatcaaagaattggaaagaacttcagtcataaaccaatgaaatatttcagttggtgaattgaaggtaataaaatggatgcttgcccaaactgtcctttgttgtaaattattccagagaactagattacgtcagccaaagatattgatcacaatgctgagaggtttataactactattaacttaccatgtgaccccagggcagaaatctaggaaaattgcaaaagcatatctactgtaatgaaaagcccatcattaataggacttactatcttgtcatccaactagtactatgttggcttcaaggcaaatatttaacaaacatttgaaacagaaagcacttctgtcttctcccttttatcttccattgatgttcccgagctattctgatgaatgtgtttttgttcttatcaataaaacatgtaggttaaaataagtgaatatatttataattattagcctatataaattagcatccaaatattgaaatagctcctactcctttattattactatcattattttaataaggagttagctcctcatgtagaccagtttagaatacggctcaagtccaattctcctgcgtagttaaaccctacctggttaagcattctgaaaactagttactcttttttttttctttttttgagatggagtctctctctgtcacccaggctggagtgcagtggttcaatctcggctcactgcaaccaccacctcctgggttcaagtgattctcctgcctcaacctcccaagtagctggaattacaggcatgcatcaccacacccagctaatttttgtattttcagtagagatgggatttcgccatgttggccaggctgatctccagttcctggcctcaaatgattgccacctcagccttccaaagtgctgggattacaggtgtgagccaccacacccggtggaaaacgaggtactcttagagaagcaattctgagatgaaaatggccatatttagaatgcataaacagacatctctgatttaaattaactactaatttaacgttatttttgaagcactgggcccaaattacaatgagaattaattcttattcctttcttgaaaagaagccctttgtctttgtgcattcaatttttcactgtcacatgagtacattcttttcaccgcatgagtcccaggctggcagaaacatccactaatccttagacctcttggctggaacgacaaaaatgcataaaatcttaccaggccaaaagagatcaactttaaaaatctttggcatccaaacatgtcagaactgtttttcgctggttctgcaaaccatttgtgttcttcatttatggtccaggggatctgtaatgtcagttcctacttttattgggcagcctggaatttttaagcaccatatttcctttacctttcttggtggtttataattttcaccgctgtttttacgagttttcttctctatgtctctaagcctaagtgtggagatgtggtaatagacagcctgctctttgccaatcaaagcccttactttgacgttggccactttgttcctgtgacatctgctctttccattatagacaaactggggctttccttctgcagaactgtgactaaacaaccaccatattcatcagtggcaacaattcttgtaaacaagaaacgctgaatacaaaggctttgtgaaatcctgcccccaagaggccacatgtctaaagtcagtcacgtggtcctcagaaatgattttagaagtctcagtaaagaaaaattacagagacactcaaatatcctagtgtgatactgctgtaaaacttcttctaattttttgttaagctgtgagaaagggcctatggaaacacctggatgaagcagcaaatcactgtcccaaagtcactaaaaatcatatttcagaaaggaaatatctagcgttaaaacaacatagatgcatttttgaaaacaaattgaattgagaaaaataataatgataacaataatgatctaatcccaggacatgtcacaggaattaatgactgactaaaagctaatggtctaaggtaatgctctcaggaattagtcttgcttattgaactgctattgttttagtaaacgaatgcttaaactgacagaaagtaaaaaatcagggctgccattatggagcctggttgattcaaagtggggcagggggagaagctaaagcaaaaaaaaaaaaaatgcatcatttgatcatttgctgttcttactcaattttttaagttcgtttgtcgttcacaaattatagattctttatcatttttttctttcatgtatctgtatgtacttttacttttgtactttaaggatgtgtttacttatgcattgttttattgacagagaagtaatctgataataaaaatgcaactccctctagtgtaggcatatcaaagatctaacattctgtttgcctagaatcgttttattttaaatactctgatctgaagaaaatgtggatcctcggccgggcgcagtggttcacgcctgtaatcccagcactttgggaggccgaggtgggtggatcacctgaggtcaggagtttgagaccagcctggccaacatggtgaaaccctgtctcctactaaaaatacaaacattggctgggcgtggtggcgggtgcctgtctgtaatcctagctactcaggaggctgaggcacgagaatcgcttgaaccccggaggcagaggttgcagtgagccgagattgcaccgctgcactccagctcgggcaacagagtgagactttgtctcaaaacaaaaaaaacaaaacaaaaaaaaagaagtggatcttccatgtgggctttagaatagtgcctcaaaattatacttcacttagaacttattactcaacatcttatttcaagagtattctaacagctgacttcttgattctacctttccgtattgcctcttccttataaccccaaaacagctaccaaaattatatatctgatcacttcactttcctgcttaaaaacctatgcccattcctagatgttctctgtgcagatcctttgttgtttcattttgtttatttttattataaaatatatttttgaggaaaaaattttaaattggacaaaaagatataaagtgaacaggaaatatcctccgaccactttctctccccctccatcctcactccccatgggtagctaatattaatgcactttttcagaaatgttccactctgcatcagtggaactgaactaaaccagacactttagtacatccttcaataacctttgtcttattgaccgaactatgactcggcacacccttccccagtcaagaatattgttcttctacctctgtgactttgaactctcaacagaaatatccccctttggggtatgagccatataaacagggctagaccaagctctgtgaactaccccctcccccactgacttataatttgatattgcttcaaaccagtatcctttacctttgttttgctcaacttttatttaaatggagaggagattaaaatgattttctcttaataaaaaattaaagaaagagattcacttgtttctatttgccaaagcagaataaatatatttttaatcaacaaaatagtatgcttttctaaaattctagttctgtttttcaatggaaatttgcagtgaaagtttccagatgcttggaagttataaagagttttaaacttaggtaataaaaataaatcacccatttatgataagcagcactctgtgaaagattatttcagaatctcagctgactgacaacttttaggagactgaactgtacttaagtgtggcaaacatgcatcatagagatgggttgtttactgtagcaagttacttgccttcggtccaactgtccttttggcagaagcacaccaatctaattttgcctgttacataaagagccacatgtggaaacctgagtcgcctgacatcatgttactgacttaatccagtcataattcagcgcccagagagcggctggcaggcccacccaccccccactctcactctcgatgtattcatgatagcacagaggttagctggacacacttgggaatcagatatgctaggtcagactcatttccaccacttatcagtagtgcgattttggaccaattgcgtaaccctcctaagcctcagtttctgaatccataaagtagaaatactaacagtggcttcctcataagattgtgcaaagattgaatgagacaatgtgtgcaaagctctcaaagggtggcagtcattattgccggagaccttgattttactttttaaatttttattcaagactctagaataaaattacctccacagatgtccaaagtttggcacagttcagaaaagtctgaaggtaaaaatcatgaaaacagacattgattttcttcatcctttttggtagtatcaacctaatagaaactggaccagggtcctgatccagtctgactttactgcctatgtgaccttccacattacttaaaagttgtgcttttcttgtctataaaaaattaagattatacctcacagcattgattgtaaatattaaattgtgtaagattttacacaagtacaaggtgttattatggttcatcagaatgtaatttttttactttgaaaatctccgtagaactcatctgattcacaaaattccctctaaccaaccccagcacttcatttgctcccacataattgctggagttgtttacacaaatctgtactcagaatcaaagagctcaaggctggagaagtcagggaatctggccctgggcctctgcttgaacattctgggtgctggtcgctagctgacccttaaacaactccatgtcctctttggagttcaaagtttgggggtaaaatcactaccccctctcaaagataaacacaaatggagctccaaggtggtgtccggtgctaacatgagacatgttgagtgtgaatctcatcagagcagtgtttttccaacataataaactgccctttgttcaaatcagaaactgatttcactcgattttcccaaatcggccctgccaggtttccttgatttaattgtatattttttgtctgctgacaatggaaagcagaagaaaatagtctcgctaaggaaatgaaatattaccaagaaaaacaggcattctcacactgtgtgaggtggttttttttttcttcacattcaatttgtataagaaaaaaggtctctaccctttgaaacaacagcattattgcagtgactattaggtcatatctacatggcccaaaagaaaatgttggaaagaaaattaactagttcataagggtatgggcaacattatttttaaaaggaaatggttcttcatacatagagagaataataaatgggagcaaaaaaatgcaagttaggcaattatttaaataattccaattttaaaatatgtacttaactaaagcatccgtggagttcaggtaaaatcatttagagggaacgcaaattaaccaaatcactactgaaattcttcactttttaagctaaaattgcttgttcttgctttaataccagagaagacctgagtcctggttgactgttagtgaggagttgtatcaaaagaacaaaggtttgaagccagttagggccaggtgcctatctcagctctgccatctactcatcatttgcccatcagcaaattcaatttttcatttatttggtttaaaaatattactgagacccttctacgtgataggtgctattgcaaagaaggaagatacagcaggcaatatactagccaagcctgttgctcccaaggggcatttattccaaagcagggagaaagaaagagagacaaaaggcagggggagggaggaaggaggggagaaaaggggaaaggaaggaaagagaaaaaagagaaagataagagataaacaacaaaactatcaacatttggtggtatgaagccatggaaccagaatgagactatctagggatcggtaccagagagggccaaggatgcagccttagggcacaacagtgcctagaggtcagggaggtgagattgaagaggccttacttatctcgtcataaaatgctaggttatcacctacaaagattttttttttttttgagataaggtcttgctatgtggcccaggctggagtgcaatggcttgatctcagctcactgcagcctccacctcccaggttcaagtgattctcctgcctcagcctcctgagctgggattacaggtgtgcaccaccattcccagctaattgttttttttttttttttttttagactgagtcttgctctatcgccgaggctggagtgcagtgatgtaatctcggctcactgcaacctctgcctctcaggttcaagcaattctcgcgcctcagcctcccgaggagctgggattacaggtgcacgccaccatgcctggctaatttttgtatttttagtagagacggtgtttggccacgttggccaggctagtctcgaactcctggtttcaagtgatctgcccacctcagcctcccaaagtgctgggattacaagcatgagccactgtgcctggctgatttttttaaaattatgtacattttgctactagcctattaaagatacccaacaaatgttaatttcttcctttttttttttaaatcctctccctcctcaccaactcccaccatgcaaatataattaatctctggttctaaaaaaaagacaactgagctcctgcataccaaaggaataaaaaactaacacttcctttagctcaatttaatctaggccccactgaatgtaatagtgagcaaagaccatacaatagcaaatcattatagatcacaactagtaatcccaaatgacaggtctcctctgttctgaatttcatttcattgaaattgttccaaagtttgcatcttaaattacacaaattatattcactcctgtcttctattttaaaaggggaaaattgtgcattcatttacctgttccctttaaacatcttaactcctgcttacacttgtatgaaagcattgatcttatcataatta

SEQ ID NO: 411 - DNA, 40374 bp, Homo sapiens
gcagcctgtaggcctgggagggtgcaggaggggtcccagagtgggcaggccccagctgagccacatccctatgtcccattatgagctgctgtgggtgacagacttggttctgctcctcccactgcaggctttctcagtgctggtatcctagatcctgcccagaagggatgtgggccctgctcttgggaagctcctggtgtgatgggggacacacagccctaatccccaccccaaaacttaactgggggcccggtgtagtggctcacgcctgtaatcccacactttgggaggccgaggagagtggatcacctgaggtcaggagttccagaccagcctggccaacgtggtgaaaccctgtgtctactaaaaatacaaaacttagccgggtgtggtggcgcatgcctgtaattccagctactcgggaggctgaggcacaaggatcgcttgaacccaggaggctgaggttgcagtgagctgagatcgtgccattgcattccagcctgggcgacaagggcaaaattctgtctcaaagaaacaaaaaacaaaaaacaaaaaaacacttaactggggaagatgggatctttgaggtgacctggaggggagggcttggaagcggtgggacgggacaagaggggagagctcccaagaggggcctgaggcagcagctatcaatggctgtgggcagagtgaggtcagtggggaggcagctgactggactcttgacggtttctcaggacgtgaggctgtctacaccgcaggccctggagcctgtggcctgggtgcagtgggccaggcccaggggcagcaggagcaaggccggggctccctgcaggatgcctgctggacactggccctctgctgggcgctgctgctgtggaagatgcggcttttccagcgccagtgggccaagtaggtgtcctcgagcttgtgacctggggttgggcctgggggctgtggggtgggcacgtgagcagtgctcagcaccaggaggaatgcgggaggaatatcccatagggcagtaactgcatcccactcctccccgtggccctgcacagggcctggcacactgcggtgcccagccaatgtcaggccctgggaggtggcctagggacactggaacagtgattgagcagagggccactgggggccagggggctgccagagacacagacatggagctctacaggggtggccggaaccctagtgaatgcccgtctccctgccaagtgtaagtccctggtggcaggaaccatgtctgtctcgccgtcaccgctggctcccagctccctgcaggtgcctggcatgttgcaggcacagaataaatactgtaaaggaacaagggcaggagccagggatcaagcttttatctcctctcccattggcctcattacacaactagagaaactgaggctcagagggctggagcagcttgctgtaaatcccagtgggagtcaggagcaagaaggtcctgtgttgagacctgggtgctgcccccacacaagatggtcactgatggaattcggagcccagaagaaggctgtaggtgaggggagggtggcgatcaggagaagccagcttcccggaggggatgtcaggaggaatggaagcgagcagttgcagggttaagaattctgtccttggctgggcgtggtggctcacacctgtaatcccagcactttaagaggccgaggccagtggatcacctgaggtcaggagtttgagaccagcctggtcaacatggcgaaaccccatctctattaaaaatacaaaagttagccaggcgtggtggtgctcgcctgtaatcccagctacttgagaggctgaggcagaagaatggcttgaacctaggaggcagaggttgcagtgagccaagatcatgccactgcaccctggacaacagagcgagaatccatctcaaaaaaaaaaaaaaggaattctgtccttgaaagccacacacccacatggtccacatggaccctcagcctctttcagtgtacccctgcaacttcaggggaattcaattcaccgtgacctttcagaatgtgggggcactgctcacatgcctgccccacaacccccaggccctccctctccagcccatcctctggcctttggacttcagggcacagttcatatctcctggcagctctcccggggcaccctcctgggcctagatgagtcccaggtctgctgctatttggagtttggggaaatgatcttcccctgggctcagctttcttatctttataagtgagtgcaggcagaagtactggtgtggttgtaggggtggcctctggagtctgggatccctgagcctggggaccagctccacctctgatcagctgcttgggctcccagccaccccgggagcatgatgaggccagccagtgaagcaggtggagcactagctcggttagccagacgtggtggcacgcacctgtaatcccagctgctcgggaggctgaggcgggagaatcacttgaacccaggaggcagaggttgcagtgagctaagattgtcccactgcactccagcctgggtcacagagccagaccctgtctcaaaaaaaaaaaaaaaaaaaaaaaagcatcagcccagtcagcccagtctcagctgctcactgaggtcactcagagaaccccagaaaaagtctggaagcccagactgtaccctgaccattaagtcagaatctagcagaatctagggtgggaccctggtgggcatcggtacctcttgaagcccccagtgattccagcatgcagccgctgtggggggcagcagcgtggaacgctagcccagcgtctggcctgtggcgagcaccctttcagcccatctctttcacagcggccagggtagggtagcccctgcttggccaccctgcacagcctgagggtgaggctgggtgggtcactcacctgccccttctctagctccttcttccagggcctgcagcagcggatgctgcagcgcagcctgagatggtggcacttgagggcactgggcccagatgccacatcaagctgcaccaagaccccctcggctctggagccactgagcagcagcacactccaagactctctggagaaggtgagaggtaggagggtggggaggggctggggcaggtaggggtggatgggtggagattgtgggaaggggacagggtaggggaccaaggactccacatctccttccccaggttcccagggcccccaccctcccggacactctccaggggagccttctgtgggcagctgggcagcggcagcaggggcagtgccttctgctctggcaggcacgggcccagcagttccagggcacagccaggtggtaccagcatacccgccagaggcggtagggatccctccccatccgcccgccactctatggacttactgtttcccggccccttctcccttccacccttggccttcacagcagcagccccttggggtctgcacctcagggggcttcagttcctcctgtcttcctgccccgtcctactgagagggtgtcggggagtggtgaggcactctacagagtcactgttcctcttggagattttgcagctgaggttccttcatttattcatttatagcacaatgcataagagttggtctccctgggttctaatcccagctttgcccctcattggctgtgtgatcttgggcaagttgcataacttctctgtgccctatttgcctatctgtaaaatggggttaatagtactggctccagtggggcaatggcgaggcacggcacatacattccccaatgccgtgtgtggcacgttgtgagtgctcagtccatagcaatgtttatggctagtggttgagcacaggacttggcagtgggggtctagaatcccaccctatccccaccactcatcatcgtgaccctgggagaggtgcttggcccctccagtccccagcaacccaccctcccataatggaaacagaagagtcacccagagcctcctgctgctggggagaggaagagaaaggagggtggggcagggctggcctgggatttgggggacagtggccatcctcagggtggaccctccctttcccagcatcttcctcagctggagccgctgggcaacagcccaatgggcctggagagagctggcttcccaccgggcctgggatcggacctgcagggctgtgctgggcctgtggcgtcagcggctgctgcagtcacggctggtggagtggtgggcccaggagcggggctggcggctggcacgagatgccctatgccactggcactcctgttggcagggtgagtggagacttggtcgggggcactgcgggtgagggcagggccagggtctgtctgagacccagactgcagccctggccaacaacttgactgtaaccgcatgggagaacttgaggcagaggctaagctacatctggactcctgacccatagaaactgtgagataacaaacatctgtggtttaaaactaataagtacttgggtaatttgttacacagccatagctaacaaatgcagttgatcagagaggtccgctgagctgtgacactgacctagctgggttcaaagaaaacaggctgaccaactcttacacattgtgctatgaatgagcaaatgaatagacctcagctgtgaaatttccaagagggacagtgactctgcagagtgcctcaccaccccccataccctcccatcccgtagcaaattctggtgatgagacccccacagggcacacccaggagtcaggtggcagagcagaacctgggggcttggactctgtagtcttgagtttgaatccctgctcttccataccctgactgtgtgaaacttaaacaacctagttaacctccctgagtctcagcttacacatctgtaaaatggggataatgtagtccctatgtcatcacctttatcttcatccttatcctcacctggcctctaggagtcactggtcggagccctgagttgggagagaagtgggcagagtcatggtgcccttaggggccagcagagttagtcagggagggtcccaggaggaggtgaggagggctcagcgggcagagcagtggcgagagaggttgaggcgtgggaaggggtcagcaaaatagggcagtgggaaggactggatttgcagaggctggctgagggtgcagtgtgttagaagccctgaggaatgtggccagtgaagggaggagggatggtcccaaggcaggcttgctctctgggtcttggcctctgggcaaaaagagctgttgcatggcccaaccagtcttttttttttttttttttttttgagacgatctcgctgtgttgcccaggcatgcagtggtgcgatcttggctcactgcaacctccaccccctgggttcaagcaattctcctgcctcagctcccctcgtagctgggattacaggcgcctgccaccacacctggctaatttttgtatttttagtggagatggggtttcaccatgttggccaggctggtctcgaactcctgacctcaagtgatcaacccgcctcggccttccaaagtgctgggattacaagcgtgagccaccgcacccggccccaaccagtctctttataacctgatatcagaagtgacatcccattgcttctgccaaattctgtctgttaaaagcaaattagtaaacccagcctgtattcaaggcggggcattgcccaggacacgaacacaggatgctgtcttggaggctgcccactacaccgacatatcgcattaatgagctggcaggcagggctgtggtggttctagaaagtcatgtcctgtccgctggagacagctgcttatgcagcccaatcattccccggcaggaacactgagccagtgtttccagaacttctagtttttacagaaaaattgaaaattagatttttgggccgggcgcagtggctcacgcctgtaatcccagcaatttgggaggcccggactggcggatcacgaggtcaggagatcgagaccatcttggctaacatggtgaaaccccgtctctactaaaaatacacaaaattagccaggcgtggtagtgtgcgcctgtagtcccagctactcgggaggctgaggcaggagaatggcatgaatccaggaggcagaggttgcagtgagctgagattgggccactgcactccagcctgggtgacggagtaagactccgtctcaaaaaaaaaaaaaaatagaaaattagatttttacctgaattctccagatttgaaaatactgtggcaaaattaacaaacaaaaacaaacccaacaactctatgagctgggctggcctggtcaccagcaggacacccataatagaggctttttaacccagacagtcagggtggcctcctctgttcccacctggtagggggcgaagggctggctgcgtagaggcccatggggagaggctggggtgagcacccagtggctcttcagcatctctctggccccagggcagcagttcctgcatgaaaagtgccagacatgggtgcaggtccacctccagggcctgcagaaggtggtgttccggagctggcagcaggcagcagctcatcagagatgcacagtgacccggccagagcagctgctactgcagaggtgggtgggcctgggggtgggagggtgttggtcctccccacgcaaggaatagcaaggagagcacccagggggtgggaagctcagacggtggcccagataggaggcctgtggcctgggaaaaaaggggcatgaagggagatcctagcctggaaacacagggccatgaccactgacaccttattacctattttgggagtggtggcaaaccccacccctaacctgtggccccaacaagccccgggagtccagctcctggccaggtcagttctttggttttagaggatatgattaagatgggagaaatcagctgggaacagtggatcatacctataatcccagcactttgggaggccgaggaaggtggatcacttgagatcaggagttcgagaccagcctggccaacatggtgaaaccccatctctactaaaaatatgaaaaattagacgggcatggtggcaggtgcctgtagtcccagctacttgggctcaggcaggagaatcacttgaatccgggaggcggaggttgcagtgagccgagattgcaccactgcactccagcctgggcgacagtgcgagactccatctcaaaaaaaaaaaaaaaaaaggaggagaaatccactcctcggaaatctaccataacgcccattgtgaggagttacagcaaggagaattctgctgtacactgtcgctaagagaagagagtgaaatcttcatttaagtaaagatgttctggtggaacatgtatacagttcatgaatgcatattgtaaaaccaagcagaggacacagaatggctcctcccacagttcagtacaaatttgcgaatgttcagtgtccccgtggggcagtgaactgttggctacagaatggctgacgtctgtgcttttgcatctgagggtgtagatggttattttgtttgtttgtttgttttttgagacagagtttcgctcttgttgcccaggttggagtgcaatggcgcgatctcggcttaccacaacctccgcctcccgggttcaagtgattctcctgcctcagcctcccgagtagctgggattacaggcatgtggcaccacacctggctaattttgtatttttagtagagacggggtttctccatgttggtcaggctggtctcgaactcccgacctcaggtgatccgcccgcctctgcctcccaaaatgctgggattacaggtgtgagccactgtgcctggccgtagatggttttttttcttggcttctcactgagtgagagatggtgttcctctccctcaccaaccacctgggcatgtgatgggaggcagggcatggctgatgtgggacttgaacccatactgctggttcccatccccctcgcagggcagcccctgccctctgaggctgaggttgcaagatggaaagccagtgctttcacctgttactggtcgtttactgttttgtgggagatttgcaggtgtaactttgaataaatgtgacttttgactctgagaacgagacaagccctcccatgcatctgtttttgttttgtttcattttgtttttttgagatggagtttcactcttgtcacccaggctggagtgcacttgcgcgatctcggcttactgcaacctctgcctcctgggttcaggcaattcttctgcctcagactcccaagtagctgggattacaggtgcccactaccaggcctggctaatttttgtatttttaatagagacggggtttcaccacgttggtcaggctggtctcaaactgacttcaggtgatccactcaccttggcttcccaaagtgctgggattacaagcatgagccaccacacctggcccaatgtgtctgttttgcagctacttccaggcctggtgtgaggttgtaagagacacgggggtgctccgggcccagcatcaagcctttcaggatggcctgaggagaagagcactgggggccgtgtttgccacatggcgggaagcccaggaagtggcagccggggcacaggagcagcgtgtggcccaggcctcccttgcccgctggagaagctgcgggcagcaaggccaggaagatgggcagcagaagaaggcccgggccccacaggccttcccagcatggccagtggccccgggcatgcaccatgaggcccagcagcaggcaggagagagcgctggggcccaggcagcccagtgctggacttggtgctgggctctgtgggtgcatgagtcctgtcggggccaggtcagccgagcccatgcttcctggaagccgcgagcctggtgagtgctgtggtctaagtgcagccccactctgtgcttccagctcaggcctcaagcctgtttttggcaggggtagagcgtaattcatggctgggtggcagggcaaaggctcaagagggtggttgggggtgacagggagaggccgccctggccatctagtcctgggccacatcctgacaccgcctcttgctgtgtgtcccctccttggggaagtctctaatggtcatgccttgcagtcaccagcacagccagccactcagcaagcgccataaacgcgctcttgccagggaaggggaggcaaagtggcactggcaggactgtcccctctctgcccctaaacaggatgcttgtccccgtctgtgattttctccttccaggtcgctctccatcctgtttacccagattctccctccagaaaagggagtgtgggaggtgggtgggccccagcctggggctgggcccggaaggccccctcccgcagggcactgggggggctccctgcagagagtcctggcctttatggccctggctgcagactccttcctctcccgcagggtcctagaggcctcggtgcagtcggcggtgcgcggcggtgtccagcgagccatcctcacccagctccggccggctgagctcaggcgcttcctgcggacagtgcagctcagggtgcggctgggactgccaggggccggcaaggtacgccccaagccccagactgacctcacgctctggccccggatggccagcagggggagcctgctgctggacgccccagccccttggaaacaggtgaagggagcctaggcagggcgggaggtccaaaaatgaccctcggaccaccggccttagaatcagcttgattcagccggtggtggcagcatggctggatgcctccccaggggcccagcaacctcgtatgcaccacctctccccagttctcagtcagcctctgacaagcaactctgaatccatcagcaaagatgaacctggcacctctcgagtgccaggccactgcaggtccggccgcaaagaccagcatgttgggtcacagcctgttagggagacattgaaatgcatgctttctcacggtgcagttgaggatcagaataggtacacgaggacagtagcatttttttgtcaagtttttttgtttatttttgagacagagtctggctcaattgcccaggctgaagcagaggagtgatctcagctcactgcaacctctgcctcccgggttcaagtgattctcccgcctcagcttcctgagtagctgggactacaagtgcacgccaccacgcctggctaatttttgtatttttagtagagacggggtttcaccatattgcccaagctggtctcgaactcctgaactcaagtgatcctcccacctcgacttcccaaagtgctgggattacaggtgtgagccaccgcgccaggccaagtttttttttttcttattggaaaagtgaaatatgcttattacagaaacctcagaaaatataaagtagaaaaataccaaaatttctttcataattctctctacccaaaggcatcggtcagtccctctccagaccagaagcagttagttctgacaccaacaagtggtgataagaggttgatagcctagcaagggggaagaagccaccaccaaaccaaacacaaaaaatgacactgcacagcagtctggggacatgtccttgaaggacacagccccaaagatactggcaggtgaggtagtgtccctaagatcaacaggcatcatcatgaatcctatttcagaatgccacaaagaatacgttttagagaagattctaagagaaaaagctaaggtgattttttttttcagtcgttttttgttctcagacagtgtctcactctgtcgcccaggccagagtgcagtggtgcgatcacagctcactgcagcctcaacctccagggctcaaacgatcctcccacctcagccacctgagtagctgagactacaggcgtgtgccaccacacccggctaatttttttttttttttttttgtagaaatgggatctcactatgttgccagggcttgtctcaaactcctgggctcaagcgatctacctgccttggcctcccaaagcattgggcaggcccattacgccatgagccaccacacctgctggtttttgttttttaaatggaattgaaaggaactagccttggctagttgcagaattcacacatatggggctatggcaacagcagattctggagtctcagggtcttttctttctagataagttacagggcaattgcttttcagagtacttttacatttctattccattcttgtcagtaaagacaaggatcccataagctgatggagaaactgaggcctctagaaactaaacgctgggaatggcacccagggtgctgaattccagggtctcctcttttctgccacaggcacacatgccccagcagcccctttggagagccccctctctatagggtactagccgggggctcagactctggagtcagacggcttccgagggatgaggcctcagacaagtaactcagctttgaaatgttttcagtggggagagaaatagccccctcccagggctgtgctccgggaactgactgagggctaactattatgggcccaccccattgttggaatgtcttcagccacatgggggaatgggtggaagaggccgggatgtgtcctgccagctagagcagcgaagaaatcccagcggggccccaggaagtccaagcccatggggttcaggtgctcctctctggctattccttcagacccgcagctgctggacacaggccacagagctggtgcctcccgcgccatcactgcagtgcagcctgggtggacggaggaagccaaggggaacggcctgggctcagagtaaggagaccttgccccgggggacaaacggtgtctgaagtgcaggggtgaagcggtctccagtcctcaggggcctggaaatcagctccttgggacacggtcttatgtgtattgaccattctccccatccattccctcttcggaatgtttcagctgttctgagaaaacactttgcattcctgccccgcccctgtgatttctctttgggcggcaggcagccgggagaggctggaggcctggggagatgggggcagggcacaaggctaagctcagcaccttcctccaccctcctcactgtactcaactcctaggcgggcactaagagcagctgccttcctggacccaccttaacctcttgtgactcaactcccctttccagggtgcagggaacattccctctgccctgccttccagctctggccacagtggcctggacagagtagctgggtcccaggcctgcccctgtggacgagggaccagggaccaagagcgcactccagccctgagcccagagcctgcaaagcccaaagcaaggcccataaacggaggctacggtaagaggagctgtgtgtgcagtttggtgggtccgagggatgggggcaagggctgaggggcttgcctgagccatggctacagctgggccctctctggccagtgctcgttcctgcaggatcctggaaaagcaggcccaggcccatggctctgccctccttctggccctgaagggtcacgatgctcttggccatcaggaggaagtacctgcagcgccggtgcctcgaggcactgcttcacgggctgcggggttcccagcaggccaggtgcctggcagtggcatggcagcactgggtggatgcccaaggggcagagcagctggtgcggaccctggtgagtgggtgcacccctctccacactgaccatctcccatttcacctcatacttaacccaaacccctctcaaaagtatggcccttggacctactgactccaaaaccttgggggacaggcccaggaatctgcattcttaatactcctcagatgacacccccttgccatagccctttcactctggtgcagcagtgtcgggggagaaaggcagaagggctggggactgcgggggagcgtgagcacaagaggccttctctgccaactgtccccaaagctcagggagtggcacctgagatgggcctggcagacgtggtggcagcggatcctgcgactgcgagtggctcagcagttacagcagcaggaagatgggtgggtcctttcccaggtactgccctcttccctgcattccactcagccagccttccagaagtctgtgccacagccacgcaccgtggagctttccctgcttgccagccccggggccccttcgttttcaggggagggggtcagttccattacagaacacacaggctggatgctggagcccttgctttgatttgtggccccagctcaggccaggcccacccggtccatcagtttgcgaagaaggtgtggcatgaggcatggctgccactcacactagcccatggagggcctgggtcctgagcgccccctccctcatttgctctgctctgagtacagcttcccagctcaccatcagatctattctgagcttgtgcatttggcctaggcaagactggctggctgcttggggcagagggaggggccctggggacaaaaggagctgggtacaggggttgctctagcaggcacagcacagaccccggagaaagcccacaacaatagcatttcctctcctccctggttccaggcctttaagaagtggcaccaacgcctggcagccaggagcccaaggagaggagctgccagtagcccaagaccctggagcaagccaggccccaagggccccgagagtggacaggaagccgccagagcaccgcggggttgggggcttggggcagagcatggggcccagctgcagctgtgacttgttctcatagaataaaaaacagaactgaacttagccttcccagggaaggaaccatgccccacacatccagggagtgatgacagaggggacagcttgaagagctctgaaggacaataaaacccactcctcagtcctagctgctgctttcagtctctcctagcggctgcccctctgccccagccagtgaggccaggaagggagtaaagaggacatcccacaattgcgtccacccccttggccatcaggctgctcttccactacacgaaacagcccatctgcacctgccagtcactgcccccaggccctggggcttgcaggtgactcgtggggagccaggccaggcagataacctctgggacaggacgaggggatgaggaaggcagctggcaggacaagggcctacctgaaaaatacaccaggaagctgggctgctgcacaggcccaggcagatctggggcccctgtgctggcaaatctcatcttagcctctgacagggaacggggcagcatcaggcctccacagccaggcaaaaggggaaggccacgagccccaccaagcacaagggttcagactgccttcaacccttaaggggcactttttctctcaaggctcagaatagacaactgtgccaaaaagcagcatggtaggtgtcagcccaatgcccatccagggggctggtgccatggacggctaagtgggcaggcagggcagtggtgtgccccttcagtcacaagtaggtggggcccagctgcccacctctaggaggtggaagggtacagcactttgccacatctcttctacgatgccaccagtgcctgatgcccttgcgtgttttgcctgtactgcacgggctccaagtgtaagttcactgggagtcccaggctggctctggaggctgccttggttcgagggcttagttggcaacaaccactctcctcgccttctcaggaggtgccacccactgtggtcctctgcaggacgcaagtgctccccaccaaaagagcacagactcctggctagagcagagagtactaggttcccatgtggggccgactcaggtccaggaagagcctggaagcctcactccagtctagctgccattgtcaggtgggggagtggaggccggggtgggagagacacgaaggagagtggagttcccaagagaagcagcactgtggaggaggaaggcgggacaggagtggctccaacgcagggcgtcaggacgcagggtcatggagcctccgtttctctcgcattctgggtgggcctgttgagaagctccaatgtgtcttccaccacctgccagaggcagttgtccagtgggaagtcattgtccaccaggttgaccaggaagtagttgtcgtggatgtactggatgatggtgcgggacggggactcctcctcatacagctttccccaccgctcaatccacagggcaaaggcctcgtcctacacacacatacccccgcacacacgcacacatgcacacacacacagaggcaagattaacagggctctccaagggctctgctcaacaggacatttcccggaatagaacaaggcccactgccagtatcacttcccacccctgcccagaaataaacaccctgcatcagcagtgacatgggtgagtcagagctgggtgtgccctgaaggctgggtccagtgtggccttcagcacacgcttgggacttggtcccaatccctccccacggttttccaggtgggcggggcaagcttgcccccggctcctttaccttccagaacatgaagctgacgggatccactacggtgggctggatgatctctcgcccagggaagatgccccaagtgacagcattcggctgcagttcaggggcattggtgatgttttcaccctgaggggatgtggggtgggggtaagacctgggccaagaacaactggagtcccactgcctggacagccttgactcaatgaggctgtctgggctcaataccctctgcctgcgcctccactcccggcctccactctccctgcgcctccactcccctctccctgtgcctccgctcctggcctcctctgcctgcatctgtgaatgatatctctccccacacaagcctgaacctagaggcgtcctggccacttcccctctcctccttgagcaccccctgctcactctctgatccattccctcttgtctagcccacctccaggagtgtgtttggcttgggtcactccaggggtctcttcactggcctccccggctctagccgtccccaatctctctcatccgtatgactatccactgtgatttgcctaaaataaagcaggaaccaagccaccccactgctggagaaaggcttcccttgcattgagggaaaactcaaattccagcaggacaaccatgatctctgcgggcctggcccctgcttaacactcccgcctcctcctgctcatgttccccgtttccccagatggtgcagctcactgcctctgcctgtcctctgccctgtcccaggaatacccttctctcctgttggccaactcctctttgtcctcagtgattcccacagatgaccctctgagaagccttccctggcctcccaggtgagatatccctcctctggacccgacagcatcctctcctgaacttgattttcccacttacactggctggtggtcacacattgatctgcctccctcactctaggctgggagctccttaagagcagggccccagttctgcctgtatctctctgtcttgcacaatgcctagcccaggctaggtgctgggtgtttgctcaacgaagggcctggtactctgtgggaaccctggggcctggcctaccttcacattgacaaggtggtaattaacccggagctcgtacttcttcagcacttgcagaagtgcttccgctgtctcgcgggaagtgaaaaactctaagtaggcctgtgggagagacaggtgcctgtcaccaaccccagccctgccagacgccctttcgcagacacctaaggtatcaggactactggcagccatgtgggcggaataatgaactgtggcgttggcacgtccataagcaaagggtgaggggagtggggacgtgagtttctcagtctggacaggtctgagggctatcagccacccctctcccaatcagtcagggaagactccacgaagaagccatttctgaacagcagcaactggtttgacaggccgagtcatgggagagaggccccacacattccatcctccccagtgcaagctgacaatgacattgacatctcctctagaaccagtgcctatcagggattaagctgggtttactcaaactcatttgctagaatgctgataatacgggaggctgggcacagtgagccccacgtgaggaaagtgggttcagggaagttgagcacgttggctactctgacagtaaacagtagagctggtccttaaactcaggtctttctgctccagggcctgtgggccttagatcagaacataatgttaactccagcagccctgggagaaaggtgtcaactcaggatagtaacagcagctgcctttcagggagtgcttcctgctcttaccatgtgccaagcacgttacatgctttgttaggtttcatgcccagaacacaagctacatcccattttacagacgagaaaaccaggctcagagaggtcgagtgacctgcctccataggtctgatttctatctttttttttttttttttgagatggagtcttgctctgttgcccaggctggagtgcagtggcatgatctcagctcactgcaacctccgtctcccgggttcaagcgattctcctgcctcagcctcccaagtagctgcaactacaggtgcccgccaccacacccggctaattgttgtatttttagtagagatggggtttcatcatgtttgtcaggctggtctcgaactcctgaccttgtgatctgcccaccttggcctcctaaagtgctgggattacaggcatgagccaccaagcccagccaatcttttttttttttttttttttttttttttgagacagggtctcactttgtgggccaggctggagtgcagaggcacaaatatggcttactggaggctcaacctctcggactcaagcgatcctctcaccccagccccctaagtacctgggactacaggtgtacaccaccatgcctcggtcatttttgtattttttgtagagaatgggtttcaccatgttgcccaggctggtctcgaactcctgggctcaagtgatccacccgccttggcctcccaaagtgctggccgggttccgtgcccagccaggtctatctgacttaaagcatgagctcccatccgctccaatccatgctcattcaaaatttaagagcccaggagaggcaggctgctctgccctaagctctggggaacccacgggtgccggtcaagagaggggggcaccccgtgcctccctaccacaccttctggaagacatagcccccgctggggccccagcccacgatggggtcggaggacggcttcccgttgatgttgggctgtgagttgatggtgaggatgccctggcggttcacccgcagcagctcctccttcagcaggctggtctcagccgccaggggctcatcgttccagggcaggcaagtcacctgggagagacggtgagctggctggggcgaccatcaggtttggcaccctgagtccctctcacggcccccaacaaagacccagcctgtctttgcctccctaagcccttccaggtggaggtctcccaacttacccttctccctttgccatgtccacagcatggaggggagggcacaggatggggaagtcacagccccgcagcctggcctgcagctggggtcaggccaggggcaggggatgaaccagggtccccactccagcatcactcactttgtgaccattccggtttggttctcccgagaggtaaagaacgaagacttcaaagacactttcttcactggtcagctcctccccccacatcttcagcagctcctccttgggggacttgctcttcaggtagaagaggtagtagtccttcagctccccaaaggcaggggaagaggaattgcccctggcagaggggtgcccagaggtcagggcacactcctgacagagggcagtgccaccacatgcccaggaggccattcctgtaaattctgcccctgactcctcccaggtcaaccacaagcatgcaaacttcttctgccctcccgctcccaagaacaaagatgtatttgcaaggaaggtctgcaggccctcaccagcggccgttagggaactcgtcccactcctgggtacggtagatgtaactctttggtctggaggcccagaagatgggacgtacatcttcctctcggcgcttggggtgggcgctgagagcccagggtaggggacgcctgggtgaggatggggacagagaattgagacaagggattggctagagggagccggaagcaggggagcacccctgaggctgagttcttccatctgatgccctctgagactggagccttcgatgtgcccagctagccatggcacagacatccatctgtaccaccgtggggagccagcactgcagccggggctgctcttggaccctcctctggggatctctgggccactgccctcacctggggtcctcagtccacatccccaggcgcttcagcacctctgtggtagccatctcgcggttgagggtgtagaagtggaggcctggcaccaagccactggccagaagctcctggcacaggctcacggccagctcgatgccatagttgcggatggcagcatcgttgtctttgattggctcaatcacgtccttgatctcctgtggcacctccagcttggacagcttcacaagctgccgaagggagtggtagccctgtccaagacatgaggggctgtggcggctgctggccagcccgtctcccaccctaaatacttctcccccttccatcatccatgccaaccacagtgtcaggcagagggacccacgaaagtccgatcatattctaggagcacacctgggcttggcctgccgttttctcctcttttttctgtttttagagactgagtctcactgctctcaaacgccagggctcaagccatcctcctgcctcagcttctcaagtagccgggactacaggcacgtgccactatgcccagctttcccactttttacagagtagagcagctgccctaagcattccagccttgggttgagccagccttttagccctagatgtgtctgttggtaacatggtgtcatctaacccagctgttcccatgctgcactgatcatccgaatcacctgccaagctcaagaagtaaaacacacattccgaggacctccctcagatttactgagtgagaacctccaggggtgggacctggagatccactttttgaaaaagcttatcaagtggttctgatgacagccacctttgggaaacactgatttaagcaggatttgtaatgagaattagaatcccttttggtgatgcttgttggccaaagtacaacaaacccctcaacagacactgttgctgggttttggggggaaaattagaggtaaccaaaatggggtggccaagcaacgctgtgcaagttctggacctgagaggagatctgggaagaactcagcgaactcagcactccacccagagcccccagcctgtgcgaggacggtgcggtgagagtggggtggagggagcttatgggctctcctgggcccctcacctggatgggaaagatcccggggacgatggggcaagtgatgcccatgtcggtgcatgccttcacaaagcggaagaatgtgtcagcctcaaagaaaagctgcgtgatgatgaaatcggctcccgcagacaccttctccttcaagtgcttcaggtcagcctcaaagctccctgcttcggggtggcctttggggtaacctgccaatagggatgacagtcaggagaggctggcctccacctgttcaaggcgagggatgaagagaccacagggactgggcagagagagtcctctgctttgggggctctgatcttgcaccttccaacagcacagcacagcctgaactaaaacagtgagtggctgggctcatgactgatatgcttctgaccccagagatgactctcaggggaggtggctcagagcccagttccaagagtgggggtggattgctccaaactcccacactgtcctgccttgagcagccaagcaaatcaggcctgcacttggtggccatagaaaagagaaaatgctacagttagcactggctgggcagcatctggggtagtaagcttgacttttctctaggcaccggattaaacattgtttttaatgtaacactgaaattactcaggggtccaagatagtgaaaagctaaaaaccaagttacacaaggaagaactgaagaaagtgatgttttcttcaaagaaaataatggatggcagggtgcggtggctcatgtctgtaatcccagcactttgggaggccaaggcaggaggatgacctgaggtcaggagttcgagaccagcctggccaacatggtaaaaccccgtctctaccaaaaatacaaaaattagccaggtgtggtggtgtatgcctgtaatagctactcaggaggctgagtcaggaaaattgcttgaacccacgagacagaggttgcagtgagccgagatcgtaccattgcactctagcctgggcaacgagagcgaaactccgtctcaaaaaaaaaaaaaaaaaaaagaatgaaaagaatacagaaactcctttcaaatgtccaaaggtctgtcctggggaaaaaggatccaccataggtgagtttgttttgttttgtttcagagacagggtcttgctctgtcacccaggctagagtgcagtgatacaatcatggctcactgtagccttgaactcccgggcacaagtgatctcccacttcagtctcctgagtagcttggactacagatgcaagccaccacatctggctaattaaaaaaaatttttttaattaattatttattttttagagatggggtcttgctatcttgtccaggtttgtctggaacttctgggctcaagcaatcctcccaccttggcctcccaaagtgctgagattacaggcatgagccactgtacccagccccctagtgaagttctttattagtcatattctgtgttgtttctaatggcagaaccagcatccggttcagagagctggctagagtactataagccactcacaaaacaatgagctcctggagtctgaaaacacaggggcagtggatgctgaagacaagattccagaattgcttaggaggtgggatcagatgtcccataggctccttactggctctgtgaactctctgacccctttcctcaatgactaaacttactagccgccttgctcggtcaggcaagcaggatgaccataggccttcatgaaactacatggagtgctggtttcatcagcccaagcccagggcaggactctgagccaggcggaaggccaagctgctttgctctgataaggcagttccgttcttaagaaacccagagtcatcaaaaaatgaatataaaaactattgtttcaaggggtaagggagtgggggataaagcaatggggcttcacacttgcaataacaaagctattttcccagtaggaatttcagaaacaacaaggctttttaatagctgaaaagtatagctacaatacctaaatatcaccgaacaaatctagcatttgattacgtatagattttgctatttactctatttttctatcatgaacagctgagggctttcttttttaaaatgtttttattttttgtagagacacggtctcactgtgttgcccaggctggtcttgatctcctgcctcagtctcccaaagctctgggattacaggcatgagctaccatgcccaacaggttggtgttttctaatccactcatcttcattacccacttgataagcaaagtaagaaaccattcagcaactgtgagctcacagcttcactagtttccaatcattatcacctaacgcccatcacgggtgcatattcccccagtaactgactatataatggctgatacaagcgatgacaatttaacagttggaaatgtctgttctctgactcctaatcagtgcttcccagacttagcacctaaacacccctgttgacagaatggacatgtccatcgggggttagggacaaggccaaagttactcacaacatgtaattttcttgaagccacgtggtttgttttttgggttttttgttttgttttttttgagacggagtctggctctgttgcccaggctacagtgcattggtgcgatctcggctcactgcaagctccgcctcctgggttcaagcgattctcctgcctcagcctaccaagtagctgggactacaggcacgcgccaccatgcccggctaatttttgtatttttagtagagacggggtttcactatgttggacaggatggtctcaaactcctgatctcatgatccacccgccttggcctcccaaagtgctgggattataggcttcagccaccgcacctggccttttttttttagttcatatcactttagatgctactccataacatagccatgtttaatataaaaatggtaggatttctcccagaatattggcaaaaaaactgtcatcccagaaaatgtgccaatcccgggacttcctgtccctggtgcacactgtcttgccatacctgagcgctgtctgagacgctgagggctcaatgccagccttcagcttcaagggtgggagagaagtccaacccacccatttctgttgggggaacctggtcttgtggctgtggccaatggtgattctctttcctgggaatttggaacggaggcctgtccattagcctggggaactggctggaactgacactctgcacactcaggagcaggccaggtgtgtggaaaagcatgggtatcaggtctcccagatgaagcacagatgtgcagtgggaagcggagatgggggaccctgtggccccagagggaatgagggagggccttgctttttgacctcttccagtgccttgtgaggtctgaggccatctcctgatcttgggttccctgccctctggaatcctgttagtaaatatccctcttttgtggggtgttgttttttttttttttttgagatggagtcttgctctgccactgaggctggactgcagcggcaccatctcggctcactgcaacctccgcctcttgggtccaagagattctcctggctcagcctcctgagtagctgggactacagccgtgcaccaccacacctggctaatttttgtatttttagtagagacggggtttcgctatgttggccaggcaggtctcaaactcctgacctcaggtgatctgcctgcctcggcctcccaaagtgttggggttacaggtgtgagccaccgcgcccagacccctctttcgttttaaagaaaagaataaggccaagcaggctaagggcacagccaggcagaggaacaaaaagctaggggtcgatggtggcaggcccaggaggggagtgggtgatacaaaaggagcaaggacatggtgcagttcacctctgcatgtccttcatccagcatggacccatgagtgcccctgatcactgtgtcctgaaccgaacaccgacaggctctctgggcatctcagcctccctagctccatccccgccaccaggatgatccagccactcacctgccacacagatgtcaaagtagtcaccaaactcacttcggatgtgcttcaccaggtccactgcgtagttgaagcctccctcctcctcttcccactggtcacctattgggtctgcagggttggtggaggtcatagtcactgggtctcacccaacctccagagaccctttctgttccctctacctagccccgacacccaggactgcgagtccctggaaggcagaaacttcatattatttaggtttggttcgtctctttctagcacttggtaagacagcaggagggaaaaaagcagcccaccagttcaatattcactgcatgctgaccctgtgctggcggtggagaataggagaccaccgctgcttctcaccgtgcctggaggattggagagcccttccctacttctacctgggcatgcctgccaccctctcccatcccacggccttggggctcctgcctcctgggagaattttctactcatctcaagtgaaggggtcttgtggtagggagcacgaggccataggatcccacccatcaggctccctcttcccactcttaggtggcctgacaacagcgggcaccagaggcctgaccggctattctcactcctggatactctgttactctgtgattgggccaagtgctgggtgcagccagcaatcgatgcagtggtgtaggcaaggcagagggttatcaggccgcgactgcattcctgacggaactcctatgtcgaggtcaagaggtggaagaggtggctgcctgtgtgtggtgcccaggatgactcactacccacaatgcctactgacactactggcggggatgggatcctgcggatcctcagcgtggggcccaggaagaagtaaaggaccatttcaggaaccaagttcaggctaccaagtggcctccgggaaagccagaacccagagtgtaggggagtgctggctccacacctccccgcagcgccatgatgttcttcaggcccagctgcttagctttgtgcagatggcccgtgatctcctccaggcgctgacggcagcaggtcatgtgcaggatggtctccaggccacagtagttcacggcggtgctggcgatcatcatggaggaggtctccttgtctgagccagggtcacctgctgggtgccaggtcacgtctatgtagagggggccacctgctgccatccggtcaaacctgtagggggtttgtttctgaagagaggttccaggagaaataccatccgtcactgccttcccatggggcccgggagttagagaagcatcaatgaaggttggagacagaccaatcagcgttcatatcctggctttgctacttatagctgtgtgatcttgggtacattacttaatctctgtgagttctgtttccttatttataagacacggcagatagtagtacccacttcataataacactaggatgctgggcgtggtggctcacgcctgtaatcccagcacttcaggaggctgaagtgagtggatcacttgaggtcaggagttccagaccgcctggccaacatagtgaaacctcatctctactaaaaatacaaaaattagctgggtgtggtggtgggcacctgtaatcccagctacttgagaggctgaggcaggagaattgcttgagccaggaggcagaggttgcaatgagccaagatcacaccactgcactccagcctgggccacagaatgagactctgtctcaaaaaaaaaaaaaaaaaaaaaaaagcaacaacaacaacaaaaaaccataacactaggagaatatgacggcagctggttccacagaacttagaacagtgcctggtgtacaaaccgaatactcagtatatgtgaggtgccgttataatcactattacagaggtaagacacaacaacagcgctatcattttgtgtgagagcagcacttcagacttttcacagcgcttgcctgtttattatctcaggtgagttaagacatcatgattgagagttaggggaatcctaactgtggcaagcacagcctcgctgtaggaacagttagaaagagggtcagcagactcactttctttcatgccaccccccaagccctgtgcagcagcttacagttatgcagaccaaggccaagttccgaaacgagactcaaaaaaaagcctggatgtgcacgagtacttgtgttacaagctatcaacggtgtatttaaacatccttgtgcatttaaacttcaaaaacttgggagtgacacgtgagacgtgcatacagtaaaaggcataaacttaaaaaaaaaactgcaattcatgaagtgctaatgtaattcagttggcatttctagagttcaagaagcataatccaaatttctaacttgctgaaaacaatctcactgctttgtgacttcctaaactgcactcgtgatccagcccccaagttccctcaaagaatacagtgtgagaatcaacatttttaacccattgaagagtgtgtctaaaataccttgacactgtggagggacttttacaggcaacagagaagttgcagatcagatgacccactctgccttctccttcctgccccctccggctgcttttttctgccgggttaaagggcagcccagcctcagggctgacagtttgctccccaggcaccaccactcccgcctcccaccttaaccttgcatgagtttaccttgagatgagattgacagctccctcagcagttcgaggagggaagaattccagggagaaccacttgtcaccagattccaatcgccgcctcatcttctcccggagtctctcatgccgctcggggtccaggcccggggtggaacatctcgaactatctttggagctctcactgccactgctggcactgccctccaagcaggggttgaggctgctgtttcctctggcttcgttcaccatggctgggttcctactgcacagggtggggcagggagcatcagggggcaggcagccacacccccgacacatcaagacacctgagtggcaggttcaagccggaggcgctgtatttccacacaggaagaaggccaaaaaaggtgacactgccccctcccagtggctccatgctcctcagctatggctgtccgggccgcctcactcaaagccttgccctccgctgctgccaggctccttgcatgcaaggcagcccccacccggcactgcaacatgctcctcggtgacagctacctgatggaaggtggcacagaggacctcacgctgccgacctgcgaggcccatattcctagcgaggggcagtagtgcccagctgggaggaccctggcttttcgatggtccatctctgtcagctcaggcccagagtgcgtggggagggaacagaggcaccttccccagcgggtgtgttcaactgggcggagctgcgacaaaggaagaggcttgagctccagccagcacaagggggcgggggcaaggcttccaggcgaggagggagggctgaggctctagtaaggggaggcggatggaaggagggggactcaggggcagagactgcaggggttggtggagatgaggccaacaggcgttcagggataccagatcaccctccagagaaggaacagctcactctggctggctctgcctggaacatctgttacttgaaacagttcgtgcacaggatggaaggggtgagggcttgactatgcagccagatttctcctgaattcatgctactccaaaaagaccgtgttgtgggttagaacttgatgctggccatgttccaaaaatagccagacccaagttcagtaagggcacgaatttctcagaacaaaagctgccccatctgtgcttgccttgcaggctgctcttcttacacatcacagaattcaattcaaatcatcacagtgacccagctactgggaaggctgaggcagaaggattgcctgagcccaggagttcaaggccagcctgggcaacatagcgagactccatctcttaaaaaaacaaaaaacacacctgtaatcccagcactttgggaggccgaggtgggtggatcacctgaggccaggagtttgagaccagcctggccaacatggtgaaatcccgactctactaaaaatataaaaattagccaggtttggtggcgggcgcctgtaatcccagctactctggaggctgaggcaggagaatcgcttgaacccggaaggcagaggttgcagtgaaccaagattgtgccatagcactccagcctgggcgacaaaagcaaaactccatctcaaaaaaaaaaacaaaaacaaaaaacagaaacaagtaatcagagccaccagggcacagacaggccaacagagggcatagggtcatctggcagtctggttaagaaaataagacaaacacttaaaaacaaacaaaacacttgcacagcaatgggcaaacacacagtagtgaatgggtgtgtggtgacatggcacaacagaggaaagcccaggtgaggttcatttctttcagactgtccaccactaaccctgtgtacctaaccatttggggtcttagactcttttgacaatctgattaaatgcactgctcccttcccctgaaatacacacacaggtgcacagactacacggggatacatccaaagacaaggagttgattccagactaagaaccctgggccaaagctttctccctctagggctgctctctttcattctgacctcaaactccagattctcagtggggatggctgtggggagtgaggaacgggggcgggggggaggagtaacagcaagagcagccagttggctttcctccagcgtttaagggcgcacctcgttaattgcttgctggaacagaacctagagtaggaggaagctgaaccacctgtaaaccctctgattttcaaagacttattgcattcctagtatatgccacgcatgtgccatatttgtaagccaactcccacgatttatccgttatcagctggactcccatagcaccctgggttgtaactgtgggtgaaaaggcctgtctcctttctctttccccagttccctgagacaggaccggtgtcctgcctggggtatccccagagtttggcacacggtgatagccaacattcactgagcgccaaagggccaggtgctgccactctctcaaaataagcctctgccacttactgaacaactagtctgcgccaagcactgggatactaagcctacgactcccagaaaggtcccggcggacccccgtgcgcagcgggacgcagtgggcgccagggaccgcagtgccccgggcccagcgctcttctccaggtgatcgccggggaggcaggtttaaaaggcaggagccggaagccgtctcggcgcccaggtggccgagaatccagtcaccaggtcactgagtcaccgatgggggcgaggacacgggcctgggccggtcagaggggcgggatcgtcacccctggctcaggggcccctccgtccaggcagggagccaaagtcagtcttcgcttgagggttggcggtcgctggaagtggtagccattgggagttacactaatcccgcgaagggtgcgcaagggaggcggcagccccccccaagaagagaggcaggccggcctccagcgctccccgcccacaagcacgtccttgcccccgggaggttgtttgccggctccaggatctccctcccggcgaccccggcctcgccgtcactcaccctccagtcccgggtgactcagaacgctcggccgccggccgcaccactgtggccgctgcaggggcggggaacgcagtgaaggggcgcggcgcaggtgtcaggttgctggagaggcgggcctacagggcggaaaccaccggcgcgggtgaccggaagccccgcccccaacatggccgtgcccacaggtctcgttggaggccgtgcctttatcgtcatgtgacgcgagtcctcgccccacccgtctgcagccactcctggtctcagtcccagagctcgagagggccacgtgaccgtcccggggccagtcacgtgaggcgcagatcctggctgggagggggttggtagaggggtccagagtggcagtaaaggaggaagatggcggggtgcagggggtctctgtgctgctgctgcaggtggtgctgctgctgcggtgagcgtgagacccgcacccccgaggagctggtaagaagccggcggagtcggcctggggagggggcggttgctaagggactgagagaggcgttgccgggggtggggccgggccaatctgggcccgcaggtggcagcgggtggggcctggggaccgcagccagggctctcgaagcgtctaccctgcttcacgtgcctaagtctggggtcttttctcataacccctcctggaatctgagggagaatccaggccagctccagtaaatcccacccatgtttccttttatttccatctgaaaagagtttggaatgaaacaagcgttttcagaatgagcttcctcacaggactttgtgcttatcatgctgctgttttagcttctccagtcctttctcactctatccctcaccctttctgggtcactgacagtccagcttccccctgcaaagcatcctgggaaaacttgagttgtgttcccagagttgacaagtcctttctgatttcagatacgtcacactgtcaaatggaacctgcatttttaccccccttttcagctggcgttggacatctttgaggtgtcctgaagaggagggtggttatttggagactatcagtggaaatgaagagctcagctgatggctgtagatcctcacccacatggtccctcacccctgaaaggttttttttgagggctggttcctatttgataatggctccagatgatttagaagctagccactgatttcagtaaatacttctgcctccttccactcctaaccactaaaaaaggctccctctgcggatctgtttttctagaccatccttggagaaacacaggaggaggaggatgagattcttccaaggaaagactatgaggtgagctcctttgatactgcttgggcaactaaagtagtgagtggcctggtcacttcaggccgaagcattatgattccaaccagagatgctctttgaccttctgtcccagggagtgagtgggtaagagaacttccttctaggaaagagactgtttagcaagcccttttctcaccttaaccccaaaacaaggtctggtgtttttacacgtttataaatctgtggcaccttaacctggatagagtatgtatttgccattaaactgtttgcttttacagcttacagagagacttagagtgaaaggcactggcaggcagtatgtgcccctaacaggtgtgtgcttataaactgttaaggaggccttgcttctcttctaggagagcttgcttttcagatattttcttgctcaagcagcttctctctgacatgttcttgattaagttccacctttcatgtatgggattcttagagtatgtgtttttagtaaagccaacactgctggggtgaaacaacatgcgtgactttttatcattaaattcttaaacgtaataaagaaggtagagaaaagcctataactccattcattaaaagatgactgttaacaccttactaagtatctttctacatccttacccatgcttttatatacatgatacatgctttttttaagtaacaaaaatgagattccactaaatcatctattttaacctgtcccactcaccccctttattatactttttgtatcattaggtaattttccacaaccttttcttttttttgacagagtctcactcttccataaattcttcatgctgtagaatttagtgtcagcgttaggatttgtagcacttttttgtttaacttttattatgaaggatttcaactatatgcaaaaacagaataatctgttgaaaccccttgtcctcatcacacagcttccacagtgatttagctcaagcccagtcttcttttgtctgtgctttcgttatccacttctcctttctcatattattattttttattgtatgtgtgtgtgtgtttgtgtgtgtgtgtgtgtgtgtgtgtgtgtgtgtgtgtgtgtgttttaaagtaaagacagtctccctatgttgcccaggctgttctcgaactccttgacaccagcgatcctcccatgtcagcctcccaaagttctgggattacagtcatgatctaccatacctggccgcccttcccatgttattttgaaagaaattctgtacatcatattatttcacccataattctatatgcatctctaatggataaggacttttaaaaagcataacccaatactattaccacatctaaaaaattaggaatttcttgatatcaaatatctactgtccagattttccagttttcttgtaaatgtcatatgtattttaactttatttgaattaggttccaaaagtccttttttatttgtttgataaatctgttaaatctcttttaatctgtagcttcttccttcatcttttttttttttttgtaagttatttgacaacataattaggacctgggattttctactgtctagattttgccatttggagccgtttgtatagtttaatatgctactctgatgggactgctttgaatgaaccaaaaagcactgtatccactgctgtgttttgttctatttctttttttttcttttttttaaatttgagatggagtctcactcttagtgcccaggttggagtgcaatggctcgatctcagctcactgcaacctccaccccaccctaggttcaagcggttcttctgccccagcctcccgagtagatgggattacaggcgcccaccaccatgcccggctaatttttgtatttttagtagagatagggtttcaccatgttggccaggctggtctcgaactcctgacctcaggtgatactgcttcggtctcccagagtgctgggattacaggtatgagccactatacctggccattttcttctgtttcgtaagtatttgttttcttgtacatagttgagaagtttgcaggaattagtataagatactccatattgttctgtcaccttgcactccctcactgaaccctgttacatcatcctgactgtatcaccaggactgagactgtctcacagccttcatcctacttctaggagctcaccaaggcttccccattgacacccaggctccctcaccccttctactaaattgtacttacatttgtaatgtgcttgccttcagctgatatgcatattcatgtaaatttttgttgttcttgtcattgtttgagacagagtctcactctgtcgcccaggctggaatgcagtggtacggtcttggatcactgcgacctccacccccgcctctgagttcaagctgttctcctacctcagcctcccaagtagctgggactacatgcatacaccaccatgcctggctaagttttgtatttttagtagagatggggtttcaccatgttggtcaggctggtcttgaactcctgacctcaggtgatccacccacctcagcctcccaaagtactgggattacaagcgtgagccaccacgcgtggccatattcatgtacatttcatgggttaatgttcttttgatattggtcattgatatttctcaaccatcttcaagaatgagcttcttgagagcacttgctttgtgtaagaacaaattcaggcacttaaacagaaaagtctggattttatttattcaataaataaatcaacttgacacaaaaagtataataaagaggggagtgagtgggacaggttaaaatagttgatttagtggaatctcatttttgttatttaaaacacgtgttaaaagcatgtgtataaaaacgtgggtaaggatgtagaaggatatttagtaaggtattaatagtcatattttaatgaatggagttatagggttttctctaccttgatagtcagtcaactagaaaacccttctgttgaatatctttctaaaaagtgccccttcttcctgtctcaggaagagttcattgcacatatttgactctttatttgataaatttagggtcttacaaaatgttagaatcccattttgacatccattctcattataggtggtttgaaaaatggtaactttctgtgagatgtgccattgcaaacaggaatgttttcatgcaggtcacacagtctatttatattgtacctttgaattagaaagaggcacactcagaacgtaagacttagaattaaaggcctcccccactggccatagcagcacccctagctcacaaccagttgaaggtggttttggtgtgaacactaagatgccccttcctggttgaattggggctggttcagcccccacctccctcccggccaggtgccattttgctcgtaaccccctgtaacagccctgcaagacacagataacattttatttttttaaaaagttgttagtcccctaaaccaaagagcaacatatactgcagaaataaaaagttagtcatagcaaaggagaagtaacagtatctggttttaataatagctcatatattccattggtacatatttacaaagggccaaactcaactaatttatttaaaaaaaaaagaagcgtggcacagtggctcacgcctatatgctcagcactttgggaggccaaggcaggaggatcgcttaaagccaggagttcaagaccatcctgggcaataaagtgagactttgttcctacaaaaaaatttgttcaaaattagcagggggccgggtgcagtggcccacacctgttacccccacactttaggaggctgaggcaggtggatcacttgagcccaggacttcataccagcctgggcaacatggcgagactccatctcaacaacaaatacgaaaaaattaacgaggtgtggtggctaacctgtggtcccccctactcaggagatcgaagcaggtgaattgcttgagcccaggagacggaggttgcagagagctgtgatcacgccactgcactccagcctgggtgacagagcgagaccctgacaaaaaaaaaagggattctggtgttctagcgttgcggttgtttctaaatgcccttcttagcagttttattgcactataattggcatactattcagttcacccatgtagagtgtacaattcaatggggttttaaaaattagtatattcacagagttgtacaaccattcctacagtcaatttttttttttttttgagacggagtttcgctcttgttgcccaggcaagagtgcaatgttgtgatctcagctcactgcaacctctgcctcccgggttcaagtgattctcctgcctcagcctcccaagtagctgggattacaggcgtctgccaccacacccggctaattttgtatttttagtagagacgaggcttctccatgttggtcaggctggtcttgaactcctggcctcgggtgatccgcccgccttggcctcccaaagtgctgggattacagacgtgagccactgcgcccagctaattcctacagtcaattttagaatattttcatcacctgagaggaaaccctgcactcattagcagccactgcctgttctccttgcccctgactccaggcaaccagtgatctcctttctgtctatttgcctattctagatatctaaaaaccttctaaatgtttacggaaccatatcattattagatggaaccatcaatgaagtacttgaccagtaatttccatacatattttggatgaaggcaagggtattgtttctcctctgctctcaggcaccactcgcggaacactgctaacaccgatatgtggaggttgtttccccactactcaggaggctgaggtgggaggatggcttaagcccaggagttggaggttgcagtgaaccgagattatgccactgcactccatgctgggtgacagagaaagaccccatctcaaaaaaaaaaagtagtaggttgtcacctgcatttctcagcagctggcagtgaattgaaggttcacaggactccctccttgagtttggttaacttgctagagcgggtcagaaaacacagaaatgctacttacatttgctagtttattaataaaggatatcataaaggatacagaagaacagccagatggagagattcaaggaacgtgggagggggcacggagctttcatgccctctccaggcacgctaccctccaggaacctccaaacggttcagctgtctggaagctctctgaaccttgtcattttggagttttatggaagcttttttatgcagtcatgattgattacatcaccagcccttggtgatcagcttaaccttcagcttcggtctcctccctggagggatgggtgtcccaccccgctaatcctgccttggtctttctggtgaccagccccttttctgaagccatctaagggcccccagccgccactcatctcattagcaaacaaaagataccacggctcaaaaaaaaaaaaagacaaagtatgtttgtgtgtgtgtgtgtgtgtgtgtgtgtgtgtgtgtgtgtgtgtgtgtattgttggggctcagaaaatgatacctggaaatatggtgctttgatatgctgaactctccaccctcacactttgtctctcccaaagcacaggatgaggctcttctctgccgttcccttatctacctagaaactggacctaccagagaggaacacagttgtctttgatccctttcctgaaatgtcattaaccagggaacattaaaactcatcttacagaggagactgaagaccaaacaacatacctagagcctggacaaactgtcccaaccgttgtttgttcactgtcccatacaatttccaaagagaatcattcacaagatgatatctgcttcccagatccattcattccccactaagaattatttcctcccacatccctatctccccttcccctgtgaagaagagtatagaagcgtctgtacctcgctggcattattgggtaatcattctgcagttcccctgtgcaatgcatgttaaataagtggatgcctttgctcccattaatctgccttttgtcggttcactttcagcagacctttagagagtgaaaggggaagcttttcctcttggccgctacaatacatatgtaggtgcatatatgtttaatcacttatggatgagtctagtttctaaaagtacttttttcatcactgtgtttcttttctgatcagtaaaaaagattttttttttttttttgagaccgagtctcactctgtcgcctaggctggagtgcagtagcacaatctcggctcactgcagcctctgcctcctgggttcaagcgattctcctgcctcagccaccctagtagctgggattacaagtgtgtgccaccacacccacctaatttgtgtatttttggtagagacggggtttcgccatgttggccgggctggtctcaaactcttggcctcaagtgatccacctatctcggcctcccaaactgctggaattacagacgtgagccatcacgcccagccgatcattttttaaaatataaaaaagcacaccatttgtgctatgagaatttcagacaacacccagaaacaaatatctccttaagcactacctcacggatgttttcccattatgaatgctgacgtacaaataatcctaattttgtttaatcaaaaagggatattatacttttaattctccatcctgctttatttttattttttaattgcatcttgctcttttgctgaataatttttggagattttccatatctttctatatagacttaactataatcattttattggtgtatagtttactatatttggatgtataattgatttactcagtcacttgttggtactccaggactcataaaaaaagaatttggactaactctaggtagtcatatagatagaataaattgtcactcatcacatgtgtttggctgacttgaaactattgtctgggagtgtggctgccacccagccaatgtccagctgatgtgggtaggaacaggttgtgggaaggagagctgatggccgaccattatttttctttgttgccaaactgctgcgtcttttttttttttttttttgagagtgtctcactttgttgcccaggctggagtgcagtggcatgatcttggctggctcactgcaacctccgcctcctaggttcaagcagctctcctgccctagcctcccgagtagctgggattacaggcgtgctccaccactcccagctaacttgtatttttagtagagatggggtttcaccatcttgcctaggctggtctcgaacttctggcctcaagtgatcctcctgcctcagcctcccaaagtgctgggattacaggtgtgagccactgcacccagcccagactgctgcttctctaacaagacaactaaaatgatttcctttgaattgtttctctaaatgtctgtggcatacctgcaagttgcttgcaggatttctgtgttttgtgatgcatgttgtaaaggatgctgcttcagatgtagaagttttaggagccgagagccaagctgaatctgtgcctcttcctaacataaagtggaagttggccaggcgcagtggctcatgcctgtaatcccagcactttgggaggctgaggagggcggatcacgaggtcaggagatcgagaccatcctggctaacacggtgaaatcccgtctctactaaaaatacaaaaaaattagccgggcgtgttggcaggcgcctgtagtcccagctactcaggaggctgaggcaggagaatggtgtgaacccgggaggcggagcttgcagtgagctgagattgcgccactgcactccagcctgggcgacagagcgagactccgtctcaaaaaaaaaaaaaaaaaagtggaagttgcttttaaaaatactttccatgttagtttgtcttgtgactaacctcatttccatagacactaactacaaaagataattataactaattgacattctaaattaatttggttctggctaactgaaacttttgttcatatctaatggagtaagtttcataaggctgatgatagctgaaggtctttaaatattttgccaaaacaggaagtttaaaaataggtaatttaaaacttctcctaaagcatgaagtatgaacctaaagcaacaccactcaaattttaatgtgcatctgagtcatctggggctgcagggctgcaggagtctaagattctgcattttgtttttgtgtttgtttttgaaacggagtctcgctgtgtcacccaggctggagtgcagtggtgcgatctcggctcaccacaacctccacctcccaggttccagtgattctcctgcctcagcctccaaagtagctgggactacaggtgcgcgccaccatgcctggctaattttgtatttttagtagagacagggtttcaccatgttggctagactggtcttgaactcctgacctcaggtgatccacctgccttgacctcccaaagtgctgggattataggcatgagccaccgcacccagccagattctgcattttgaaccagctcctcctgggtgctgcaggtaccactgctctgcccatccacacgttgagtagcaggaacccagaggtttgtccctttgcaggtcttctcacctgacatgaccttttgactcaactttgcctcttttcagagtttggattatgatcgctgtatcaatgacccttacctggaagttttggagaccatggataataaggtgggtcttacaattcttcatctctggggatcaaatcagtcttaacatggcattttttttctcttctaaaggccccagtaaacatctttacaccttgttttttgaaccttttcatgcgatacaggcagacctcactttatgcgctttgctttatttcacctcgcaggtactgcaggttttacaaactggagg

SEQ ID NO: 412 - DNA, 129334 bp, Homo sapiens
taacgccgcacacacggcattacccacccgtaaccatcatacttcctaacactgcacacagggcattacccacccataagtatcatacttcctaacgccccacacacggcattacccacccttaaccatcatacttcttaacgccccacacacgacattgcccactcataaccatcatacttcctaacgccccacacacgacattacccactcataaccatcatacttcctaacgccccacacacgacattacccacccataaccatcatacttcctaacaccgcacacacgacattacccacccataaccatcatacttcctaacaccccacacacgacattacccacccataaccatcatacttcctaacgccccacacacgacattacccacccataaccatcatacttcctaacgccccacacatgacattacccacccataaccatcatacttcctaatgccccacacacgacattagccacccataaccatcatacttcctaacgccgtgcacacatggcattacccacccataaccaccgtacttcttaacgatgtgaacacatggcattacccacccataaccaccatacttcctaacgatgtgaacacatggcattacccacccataatcatcatacttcccaatgaactgcacacacggcacaactgcaagtgttcctacctagtttcagtatcattttaaacattttctagttcgacttggtcataaaaataaagtttagaaattactttgtgccctttttgtagaaaagaaataaagcattttgaaatgttaacacagtgggctgggtccaatatattaaacacagaaactttaatgaatagtagatacacagcaatcttcccagctgtgattcctggagattttttggactgtattcatacctggcattctagacaaaggaggggaaagaaagtatgaatggacaaaaggccaagctaagaaggcagtaaagcttttttaattcaaattgtaagaaatagtttgtttcaacagaatgaaggataaaaaccatatgatcatttcaattgatgctgaaaaaacgtttgataaaattcaacatcacaacaagataaaaaccctcaaagaactgagtatagaaggaacataactcaacataataaaggccatatacaacagacccacattagtatcatactgaatggggaaaaactgaaagcctttcctctaagatctggaacatgacaaggatgaccactttcaccactgttattcaacatagtactagaagtcctagctagcgcaatcagagtagaggaagatgtaaaggacatccaaattggaaaggaagaagtcaaattatccttgtttgctgatactgtaattttatatttagaaaaacctaaagacccacaagactattagaactgataaattcagtaaagttgcaggatacaaaatcaacatataaaaatcagtagcatttctatatgccaacagtgaataatgtgaaaaagaaatgtagaaagtgatcccatttacaatagccacacatacaattaaatacttaggaattaaccaaagaagcgaaagatctctgtaatgaaaacagtaaaacactgatgaaggaaattgaagaggacaccaaaaaatagaaaaatattccatgtacatggattggaagaattaaaattgttaaaaatgttcatactatccaaaggaatctacagattcaatgcaatccctatcaaaataccagtgatgttcttcacagaaatagaaaaaacaatcctaaaatttatatggaaacacaaaaggtctagaatagccaaagctatcctaagcaaaaagaacaaaactagagaaaatcacattacctcacttcaaattatactacagagctatagtaaccaaaacagcatggtactgacataaaaatggacacatagaccaatggaacagaagagagaacccagaaacaaatccacacacctacagtgaactcattttttacaaaggtgccaagaacatacactggggaaaagacagtctcttcaataaatggtgccaggaaaactggatgtcaatatgtgaaagaatgaaactagacccatatctctcaccaaacacaaaaatcaaataaaaagaaattaaataattaaatataagacctcaaactatgaaactattacaagaaacactgggggaaaatctccaggacattgaatctccaggtctgagcaaagacttcttgggtaataccccacaaacacagtcaaccaaagcaaaaatggacaaatggaatcacatgaagttaaaagacttctgcacagcaaaggatataatcaacaaagtaaagagacgatccacagaatgggagaaaatattagcaaacaacccctctgacaagtgattaatgaccagaatatataaagagctcaaaaaactctacaggaaaaaaatctaataatccaatcaaaaactgggcaaaagatttgaatagacatttctgaaaagaagacatacaagtggcaaacaagcatatgaaaaggtgctcaacatcattgatcattagagaagagcaaatcaaaactacaatgagatgtcatcaaatcccagttaaaatggcttatatccgaaagacaggtaataataaatgctgataaggttgtggagaaaagggaacccttgtacactgttggtgggaaagtaaattaatacaatcactatgcagaacagtttggaggttcctcaaaaaactaaaagttgagctatcatatgagcctgcaatcccactgctgggaatgtgcccaaaacaaaggaaatcagtattgtagagatatctgtactcctatgttcgttgcagcacagtttgcaatagctaagatttggaagcaacctatgtgtccatcaacagatgaatggataaagaaaatgtggtacgtatacacaatggggtactattcagccataaaaaaggaatgagatccagtcatttgcaacaccatagatgtaactggagatcattgtgttaagtgaaataagccaggaatagaaagacagacatcacatgttctcacttatttgtgggatctaaaaatcaaatcaattcaccttatggacctagagaatagaaggatggttaccagacactgggaaaggtaatggaggattgagcagacatagggatggttaacgggtacaaaaaaatagaaagaatgaataagacctactatttgatagcataatagggtgactatagttaataataacaattatatattttaaaataacttaaagaatgtaattagattgcttgtaaatcaaaggataaatgcttaagaagataaataccccttctccatgatatgctgatttcacattgcatggctgtatcacaagatctcatgcaccccataaatatatacacctactatgtatccacaaatttaaaaaaatagtttgtggattaaaaacaaaatggaaccctagaaatgtgtaacagtagttgttttacagacaggaatactaaagtagaatacctctgcagtaggtagaatacccaaaaatgttgaagttaatgagaaaagcaatggggaaacagcagacactacctcttccccagctcctgggctagaagtagaattctccattgcttttatgatcgtgaactacgtttgtagagtgctttgtagcctaaaacttacctataatgtgaattaattcttgcaacaagaatatgtggtctgattctcactttataagtgaaaaaacttaatctggtcagaaagtggtagcggaagcaagacttgaaccaagctttccggaagggatggaacatgcagcacagagcattgctgtttccctctcatttcgcaagctcttgtgggctattctgctctgtggaattccactgtgggacacagggagggtgaatctgacgttctggagtagtgtggctctcaactggttttggtgtaaggacacctaaaaccaaatgatttcgaagaccttctagttaaagatagtgcagaaagaggctgtttcctttttaaaaatctttgtatccccaaccattaaagaaagaatggatgaaaggcaaactcatcaatgaaaacggactaatgcaatcctgaacccaccttttgaaggctacccttcataggctcagaaatctgaatgcagggggatgctgagagtcaacataatttcttcagagctcagtaaacacatttccccaaagcccattgctgaaagtgatctccaagggggaagcagggtgaaataatgagggaatcagtgatcttcagatctcagcattaaggaggtgtggctaagagctattatagcaaagcacatacacctcctgagtgttgaaagggagaggaaggctggacacagtggctcatgacagtaatctcagcactttgggaggctgaggcaggaggatcacttgagcccaggaagttgaggctgcagtgagctgagattacaccactgtactccaacctgggcaacaaagtaagaccctgtctctaaaaacaaaaacataaatgaaaacaaacaacaaccagaaaaaagaaagaaagaaaaggagaaataagttaccaatggaaaaaaaatgacagatttactaaaagtattttggagatggcaaatccaaacagaactgcttcacatcacttcctctccctaactcccctcccctctgtccctgcctttgttattcccatttttgtttacttactaatttatccaatacctgcatgataaataattaaaatgaataatgaaaatgaaccaacatggaatctactgcagaggttttaattggaaaaagaataaaagcaaaaggctgatgaaaaaaaataccatgcaagataaattaaccaaggaaacggaagaattctaacagccctttcctttcagagacaactcttcccctccaaccctatgaattcacaaagccaagggcttaaatatatattaaaatatagtagaagattatctagcagggcctttggaaacaaagataatagaagattttaaaaaataatagaagattaaatgaactgaaagaactccaataacaaaggaaagcaaaatataaaaactttataaagataaaaagcaacataaaaaacagaatttaaaaactaaaatacgaggaaacagttaacagctgtaatgaagtcatacagaataaaatgtaaaagaaaaactataaaaataattagtaataaatatgaaacaaagagttcaaatacattttaagtgacgttcctgaaaaataaagctttttttttttttcaaaaatagagtaaaaacaaggattacataagcttccagatacagaaaacgagtcaggttcttgagggaaaagatctgggtagcctcaaaaacgtgcacagtaagactaagtgccagaaggcaggtcagcaatgtctagagtttataaccatgaattttatagtcagtttagcttccttacagttacaaagagatcaggcatttttaaacattaaaagctgaaggaagataatgatagttattgctgtataactaaacatcctaaatgtagtgtccttagaaaccccaacttttatcttgctcatgaatcagacctggctggctgggataactcattctgctttactcagcatcagctgaagaagcctggagctaggggctgggtcatcggggggttcccttactcatgtgtccgatgtctgggcaggaaagtttcaaacatctgtgagctggaactgctggggctcatctattctctctccatggttgctccaatatggtggcttcagaatagcctgacttcctacatgtcaacccagggcttcaagttgcaggccacgaaggagaacatctggaggaagctgcgtcagcccttgttgtctaccacgccatccttccatcagtcacagaagaccaccctgactcaagggaataggaaatagattctgctggatagggaatgccaaggttctgaaagaacatgtagggcttcaaatatggatgcaacttaccagaataatattgaaaattctcaactgtacagtgaaattcaaccaagaatcaaactgagtaaaaaatccacagtataaaaaatgctaatgttaatttttaatgcattagagattggatcgatggtccaacatctggctcttctaccatcctacttcgtctgagtcttctgtccttgattcatctttcatccagtcgggactccagggtcaaccactccatgaatctcttaaaatatcctcaattccttttttcccttcttttccagatgtcacacaaaatctcgaccctgggtcaatttaactttcccattctccactcctccccccaggatattaagaactgttggtaaaaatcatgtattttgggccaggcatggtggatcactcctgtaatcccagaactttgggaggctgaggcggacggatcacttgaggccaggagttcaagaccaccctgggcaacatggcgaaaccccatctctactaaaaatacaaaaattagctgggcatggtggcacgtgcctgtaattccaggtgctcgggaagctgaggtggaagaattgcttaaatctgggaggcagaggttgcagtgagccgagatcgcaccactgcactccagcctgggcaacagagcgagactctgtctcaaaaaaaaaaaataaataaaataatgaattttatagccagtttagtttccttacattgttttatgtttaccataaaacaatgcagaatatagtcactataaattcatagtcttcgaccttgaataagacttcaaagctgcctacaattcctatttattctctttctccatgacaattatatcaatgctttttttttttttttttttgagacggagtttcactcttgctgcccaggctggagtgcaatggtgcgatctcggctcactgcaacctatgcttcctgggttcaaatgattctcccacctcagcctcccaagtagctgggatttacaggtgcacaccaccacgcccagctaattttgtatttttagtagagatggggtttctccatgttggtcgggctggtcttgaactcctgacctcaggtgatccacccacctcggcctcccaaagtgctgggattacaggcataagccaccgcacctggcctatcaagccttttatactatacttacaccttctagcccacacccactctcagtggacatcacactcaaatgcacagagaaaatagagaccctcaaatagatgcaccctcaacgctcctccattatatttacaatcttggctgaaagtggcaatgatgagggtgaggaacaaaggtccatgcctcctccagaccatgctgtaaaccacctctgctgcttctcagagtgggtgctattggcattttggatacagcgattttcttgttagattttcccacatattgtaatacttttagcatctctatccctagaacaacataaaccattagcaagtcaagtcactgaaataggcaatacatatcctgagatattcataaaagcccctcaaggattgggacttggttgagattttcagaccggtaaaccctttgtgttacagatgaagaaaccgaggtccagagcacccaaatcagtttcccaagagcatggtttaatagcactgggaccggcagccaggtgtactggcgttatgccccaggctccttctactaggcgacaggttctgctcaactccacagctgaaactgtttatgttaaaaataacacttaagctgtaatggatgtcaaaataatacctgatccaatgaaaatgagcaaacctttataataataagcaaataaataaatatgtctgcaaggagaggtgtgcatgaattaaatattaatttcaaacaaatattaattctaaaaatgtctatattaatgttttctcaaatagaaaaacttataccagttaataagcacactatatccactctgatgcttttaagtgttaaaaaatatcatattcagtaaaaaatgttttctttaaagaattccttattctctttctgcaccacttatcaaatatcttatttttttgtatttcattttaagatatagtcgagttatttatttgactatataaagtaatattgaatcttctactctcattagtaacctaattcttcaatttctctgatttttcttgaacggtatgtcatcaaagtgactatcattttagctaaatacattgtcatatatgagcaaaattgcatattgatagaatttctgaaatttcttttactttatttgacatattttacactaaaaaaaatcaatgtaactgataggacttcttaaattgcctattttaaaaaaatgtattacccctacaattgtaagtaatttggaagccctggtacaacctatacagtgtttttgaatttgattctgagtggacagctgtaggagggagaattactgagtcacaaaatgaaacagatcacagcactgattgggccctacttcttatcaaaagaggctcttcatacacttaactcagcaagtcactgttgagcactggaaatcgtggagctaggtccatcctcactcccctccctgtccaaatgagaggaggaaatgcccaaactattatctttccaaacctgagccgtctttttgtcgcctccatcacatgatcagattttttgtgtgctcactgtactcattcttccccctttttctatcatggatacatcccagccttttacatcagaaatgtgctcagtttttttccctccccaatcttctaccaccctttgctttcatttattccttaaacgactatcccttttcttttccctcgttcatcaacaacgttttgagaaagtccaacgtgaacttcaaagcccaactgattataaatgcttccctctctcaatgcttccctggccaccattcagaatcggtgcgccacctaggaaactatcttttagacagtcgttactgagggattgtttttgaagttagtaaaataaaatacactccctggttctcctgataatcacggaaatcgtttgctataaagctatttcaataaagcaataatagaaaaacaaacatcaggaaggaacaatgagctctgagaggacctaggaacattaggggtaggaagatgaatttaaactatgcctcgaggacaaataaggatgttgctgacggtgccaaaggtggggagaaaaggacaataagacaaacagcatgagcaaaggcattaaaatacgacatccatgactcactcagtgtatttaaagataaaatgtttaaatgtattttccaggtgttacatggtccttaatgatttttcaaatccttcagtatataacatgcaggctcatttggttttcatttacacactgtctctgtaattctgtcatacttgcctcaagtgactttaccgtggaagaggacctgcagggaagcacatagcacaggttgcaggacagcttcgtggctcttggctaattcgagaatgtatgagtggcagaattccatatagttattctcatcctaacatactacatggaagcaagattgtaaagaaggaacacttgcctacctttaaatacaaaaggtgaccaatatttaccaaaaagaatcttgcagttgttgtgaacaaccaaattcatgtagaacagtttgcaataacagctattaagaaaacaaatggtctgttattcagaccagaactcctgttgctctttagatgacaaatgcatgacgctttaaatgtatgtacgaaaaataaatcttttagaagactttcaaaaatacttctaatttagagtttctgactcagcctctcaactttcattccttcataattcactcatccataataatatttattagaatctacctctgtataaggccctttctaggagtcagggatgaagtggggaataaggtagaccaggtccctgccctcatagcaaccatattctagggaagcaaaaaagatttgcttttcaagcactccaaggttgctaattattttcctggtttcccacatggttgttgagaaaccaaacaaaacttgtctttggcgtatattctttctattctttgaaaattttgtacattagcaaaacacattcactaaagcaaataatttttcttggttaagtaatttggttattcttaccaaagatatagagaccttccttcaataaactataaacattttcagcaaataactaatcagagtttatgtgagttttttccaaatatgcacaacttatagtagcaaaatatttgcaaactcagtaatcataagttaaaccataatgatgatgacatattttgaaacatttctttgtttagtaccttgaatatgccacacactatcctaaaagaaaaaaagtgaagattcaaaagcagtgagagaaaatttccctgtacagtacacaaagttgtatgtacttcagtggggttggtgtttttctccaggagcgtctaccagcacagctttgatcccttcatcaacaatatcctaaaattcaacgcttttatggttacaatactgcctttccaaaggcatgtcagctagatctagcatacagtttttggcacaatttatttccttccttccttccttccttccttccttccttccttccttccttccttccttccgcctgccctccctccctccctctctctccctttctttcttttcttttcttttctttctttctctttctctctctctctttctttctttcttttctaggatggagttttgctcttgttggccaggctggagtgcaatagtgtgatcttggctcaccgaaacctccacctcccaggttcaagcgattctcctgcctcagcctcccgagtagctgggattacaggcatgcatcaccacgcccagctaattttgtatttttagtaaagacggggtttctccacgttggccaggctggtctcgaacttccgacctcaggtgatctgcccaccttggcctcccaaagtgctgggattacaggtgtgagctaccgcacctggcctctctatttttaactgtgcaacaaaagatattccacaagaaggtaacttcagttccaattgtttgttctgtgagaacttggtttagagatagggttggtaaattgttaaaggtgtgtggtatttttagtcatttcccaatttgctaaattacaaaggactagctttttgatagattactgggtggccaatctgattgataggaagctcaaagacaagtctgatcctcaattacacatttttaatcctcgaagccagagggttagtcttttctttaacttcctttttaattaattttattaatctgttgcagatgttcttctgatatatccatgttcgtcaaggaagatggacatgaaagctaatgtcttggcacaagattacgtctaaagcccacaacttaaaatgagatgggctaaacttcacataaactgcatacaccttggtatcactcctcctcaaactaccgtctcactacttacagacattccagcttcagaatccacgccttatataaggtgactgccacctcctgctctctcaaaatacttccctacttttaggtgtcaaaggagcagtaaagggtctaatcctataaaaattcatttctgccaatatgctagcccctcaggaaacagtcttaaatcattatacaatttgcatttcttaacattttaggtgccatttaggtcagtggggggaaatctctttgggccagcctttcgattttggtgtcacagattgtttaacaaagatgacagcagttccaaccaccagcgccaaggggctacttccctcaacacgtcagaatgcacaggattaaaagaagagtttcccaaaaacattgtatctggtgaacttagattaggtcgaatcttctaacccaagcaaaaaggcattatcttgcttccatccttattaaaatcttggtgtttgttttacagttttggtctttaagctcacaaaacccaaaggatttttgaataattcccagtagttttaccatgtataaaaactgccttcaattttataagcttctttgatctctgctaggccaacatgctggggggataaatatcaaaatttaaaaagaaattctcagccagtaagaaaagataaagattaattcactatgttactgtacattcaacaattcacacagctctattatcactttaagataccatccgctgaccatcattcttccttctagagaggctttagtggtaagaaattaactaaaagagaaaaggaacttttaacctgtcctcacagagatgatgggtgggaaagaagataaagaaatttattactgaaaaatataaattggatcaacattagtcacactaaacagattaatgcttgttttcccaaagtattttttggtatttagagttgcatccctgttctctgctcaccctgaggtaggcccagcctctggggttgtggtttgagcaggatcagcgctccactagccacctagtttctttgagtcttgagcatcctgtttttcccaggcagccagagtcccctgatttcttttctgcttttttttgttgttgttgttttctaatttagaaacagggttgcactgtgtcacccaggctggagcacagtggcacaatcatggctcactgcagcctggacttcctgtgctcaaacagtcctcctgcctcagccttctgaggagctaggactacaggtgcacaccaccatgcctggctaatttactaactttttgtggagatggggtcttgctttgttgcccaggctggtctcaagctcctggcacaagtgatccacctgcctcagcctcccaaagctctaggattacaggtgtgagccaccacaccgggcccagagtccctgatttctggggcttcttttcaagtcgcaataacagatgactgtgacaagatggatatgtaatcacctgatttatcccttaaccctgctccctggagcagagtcagctggagaattcagagccgcagcgcccaggtttcttaggtaggcaggctcagcttccccctttgtatgtggttgttcttttccctcatggcatgattccttgcttgtggtaagctcctaaactaatataaggttttagaaatcatttcaccaaagtggttgctttggtagaggagagagagggatatatctggaagagacacgagagtgctgaaaatgtgctatttcttagccttcttaggccaagagttacactgtaacatcgtagttacaatgatgtgcctactttgtgacagattcatagaaatgtgcagttatgatttgtgtgcttctgtgtcttatttccattttaaaatcttaacagtaaaagagtggcatgcccctgtaatcccagctactagggaggctgaggcaggagaatcacttgaacctgggaggcggaggttgcaatgagccgagatcatgccgctacactccagcctgggcaacagagcgagacttcacctcaaaaataaataaataaataaaaataaataagagaaagctacagaatggtatctctgtgttatcctctgtgatttgcaaaatgttttctctgtatacttttaaacatacagaatatttctggaaaaacaaacaagaacttagtattaatggtcatcaatagtgggaggtcagggaataatcatgggatcttagtagaaacctaacattttttgtgtaaacttttatgtactctttaaatttctcaacatttgtatgtgtatattttcaaataaatcaacatttacaaaataaataaactagaaccgaactgaactgaaaaaagtgggcactgtattaagggacagtttgtttggtgtggacgaaatattcagaaatgtagtgatggacgtatgcagcaaagcaaggagcagattgcaggaggtccagcacgcccaacaaaggactagactgtatatttcccaaactgacactgagcctgtctttccccgccagactccttctccagtcttccccttctcagtatttttcatcacaaaccacccagttgtatagactgcacatggattacgcaaccacaacctctccttcttccccgccatcatagtcgtcactaaatcctttgcagtctaactcgaatgtctatttttaatactaatttttctattttttttttactaatttactaccttccttgatgtccacagatcctaccctcggccaaatcaccacctcctctccctgacatattatagtattcttctgacttgctttctacttgccccgttctgtgcctaaagaaagcacttcagtgggtttacactgcgtgttgataccccctgaacctaaaataaaagttgaaaaaaaaatgaagctgtgattgtcgtggtcaacaacaccccaggggatgtagtcctgcctccctctcagcctcacttggaagcagtccttcgctcttccgtgttccagccgctctgctcttctcagtaccttgaacttaactcactctttcctgacttggaacctttgagatgttccgtctgcctggaactcaattccaaaccatccttgtgtggttggctccttctgtttctttaagtcttgatttaaaagttccttccaaaaaagagacttgctctgattacattcagtgttcctgcctcccaatcgtctgtaccacggctccatggtcacggcattcctcttccttctgtctcacatattacaggctgctgcgggggtgcaggggggaagctactgcaaaatccatgggatcagctgggcgtggtggcggtggctcatgcctgtaatcccagcactttgggaggccgaggagggtggatcacgaggtcagggtggatcaagaggtcaggagatcgagaccatcctggccaacacagtgaaaccccgtctctactaaaaatacaaaaaattagccaggcgtggtggtgggcacctgtagtcccagctacttgggagggctgaggcaggagaatggcacgaactcgggcggcagtacttctagttaaatctggtaaatttaacacatatcttcctctgcattctctgctcactaaaataatgaaaaaacaatttttaaaggcatagtgaaagacatcaacaacatttttgaagttggaaagtgaatggacttattaaggcagagacatgactctgcaagaaggaaagtaacaagaagtaagccaacatgtgacagaaccctaaaaagttaaaacatttggggcacaatgaatttctggaggatggtgtgtggagtggggctgggacaaagtttataaactaagtgcaggcaccttatatcccaaacacaagccaaaaaagagtggcttaatttctgaagaggctcaaccatagtaggtctggccttggagggataccagtctccgctgagggtctgttaaaatgatgtcctgaaaacagggatgttaggtagacatctgcataccaaatggagaggtcttccacccccagctcacttctcctacttggctcttagaatactggtcttaggcttctaacatacctccacccaccccacctctgcaacagcaacaggaaactgggagactcctcttgagaaaactgaggagctcaagaaaaaaagacatttagatgctcccaatggaaaagtcagcatgccagatttccagtgttcccctaaattcattctctcttctgcaccctcttctctgccctaggaatctgagctgtaaaggctacataagtgatcctcattgccctctggctttttacttggttcaactactagggagcccagcaatagatgtaagggtagaaggagaatatgtcatgagcacttatgcactggttcccctacatacaggattgctttctgctgactgagctgttgatcaggcatcttggtttctcttccaagactctcattttctaagctctggtaatcacttcttccctccatccctttgagcccaggagtggcaataaactcagagtaattcccaattccttgcgtgttttcaacactctataaatgcccaacaggttctttttgcctgctgcacagaaaaagccaactcactgagacaacagtattgcagtagagaaagagcttaatgctcacagggctagacaagtggtatgatgggagttaactacccaagtcagcctccctgagaactcagagactaggatttttatggatactttggcaggcagggagctagggaatgggtgctgctgattggttggggaggaaaccataggggtgtagaaaatgctcctcgtgggcagagtcagcctccaggtgggggtcacaggaccagctgagtcatgagtcatgggtctggttggggtcagtctgttaccagaatgcaaaagtctaaaaaacatctcaaaacaccaattgtaggttctacaatagtgatgttatttacaggagtaactggagaagtcacaaatcttgtgacctctggccacatgactactgagcagcaagatatcataggaaagaaatctaggggacaatggctggatatcatttaactacacctacatcttagaagagttcaggcccctcccatcatcctaatcttgtggccattcctttatcttacaatggtggcttcagttctcagacagtggcctttcattagtcttacaaaggcagtttcagtccccaaataaggagggagtcagttttaggggggaactgttatcatccttgctttaaagttaaaccagaaactaaattcctcccatagttattgtattagtccatttgcatgctgctgataaagacatacccaagactgggcaatttacaaaagaaagaggtttaattggactcacagttccacagggctggggaggcctcacaatcatggcagaaggtaaggagggacaagtcacatcttatgtggatggcggcaggcaaagagagcttgtgcagggaaactctcccttaaaatactgtcagatctcgtgagattttatttgctatcacaagaacagcaggggaaagatctgcccccgtgattcaatcatctcacatcagaccctcccacaacacgtgggaatcatgggagctacaagatgagatttgagtagggacacagagctaaaccatatcagttatcttggcccatgcctaggaataagtgaggacagccagcctgtggggctagaagcaagatggaatcagccatgctagacttaccttgctgtcataatccttgcaaaggtagtttcaattctgtctacatcattgtaagttgtcatttcactcaattttcctaaaaattgtcctaatttaaacactgcctttttttcccccaggactctgacactaccagttcactatattgtggccttctcaatgaaatcctcaagccctcaaattcagctcttacctacagagcatccaaccagctttttagtggttcattttcaaccatgaatggacagccaaggatcaatcaccagacacgtgaaaaatcttccagcatgaaagatagaccaaaacgaagaggaaaaagatacaatgagatcacatgagaagaaaagaagaagacagccaatatctctccaataggaaatttaaagataagaaaagggaagaaaaaataatcaaagaaaaagttcaagaaaaagttcccaaagtgaaggacctcattgtaaaaacgtaaaaatagagagatgctgctaaaaacttccataaagaaaaacaagtcacatcacaaatcaggaggatggccaccttctcaacaactttggagaaattccttacatttatgaagaaaaatgacttgcaacctagaattttataattaacccaactattaatccaatgtgagaatgggattataacattcatagacaggtaaatactcaaaaatctactgcagtagacagcttctaagatgaccccaaatgtcccgacctcctagcattgatgcccttataggatctcctcccactgagtatgagttggacttagtgacttacgtctaatgaatggagtattggaggagttatgggacactgctctaatgttaggctataagaagactgtggcctccatcgcgggcactctctgatgttctcttttggtctccttcctgtgggggaggtcggcagccacgccatgaggcagtttctctgaagagacccacagagaaagggctcgatgcttgccaacaaccgtgtgagtatgcttggaggagtcctagtatatatgtttaacatgacatagtttctcagtttattataacacttgtaaccataataggtctgttgcccaactcacacagcaagtcaacatactgagatatggggctgcagcagagaaaggggtttcatcatagggctgctgaatgaggagatgagaggaaaccccaaattcatctccctggggagtaggagggtggggtttttaaagaattttggagtaggctgaagtgtgaagatcatggattggtcaaagagtgcagggtgaaatactgggacaagaagatgaagaaacagcattcccacgttgatttggctcctctgtggggtcttcaaactggtggcatcaactattctcctggaattcagaatctgcttaagcacttcttaaacacaagccttatgattctaaggtcagaaatcctccctataggaacagtgcggacgtgagtgctcagtgccgggtgcaacagccctttcagttacaaggaagtgggtcaaagcgcagcctgattattgcttaattacaacaacatttctgtccagaattcttgttaacactgtcaggacagccttattgtattaagtataataatcacattgaaaattatttaggctttcctcaaaaagacaaaccacagatcagcagaccatttgcaaagcatctaattaatagagggataatgttcaggatttgtaagagtttgaaaaatatattaaaaagataactgaacagaaaaattctcaaagaaaacaaataggcaaatcacagaaaaaaaacacaagtggccagtgaagagataccaaaacttcactaataacccgggaaataaaaagttaaactaaagctgacaccattttcacccatccattttgtacacattatgaaacctgttttcaccaacctgatgctaaaaaagaaaaaaattataaagtctaacattatcaagtattgtgaaaattttgaaaaatggaaatactcatccgtcattagtgtgggtataaacttgaaaaaccatcctgaaagtattttgattatgtctatgaaagctaccccccaaaagtacaagttctacaaaagagcaattttacttgttacgtgcattatattaataccttacacatctgcagtgagacatgtaaaataatattttaaggacaaataaagattaaaagtgggcctggcacagtggttcacgcctgtaatcccagcactttgggaggccgaggcgggcagatcatgaggtcagcagttcgagaccagcctggccaacatggtgaaactctgtctctactaaaaatacaaaaattagccaggcgtggtggtgggtgcctgtaattccagctacttgggaggctgaggcaggagaattgcttgaacctggcaggcggaggttgcagtgagctgagaccacgccattgcactccagcctgggtgacagagcaagattccatctcaaaaaaaataaaataaaataaaataaaataaaaaataaaaataaaaataaaaaagattaaaaatgatagccgaattcttccgtttgaaaataaggtaagaaacttctccctctctcttttcttagaacatttactttagaagatttgtaattgtaagttccttttctgtctctaaatctttttccaagcccaataagcctcttgccagctttacgacccaggaatggctttctcaagcacctggaaatcacctctttgtaaacatcgagtgagacagtgcctctgtggcccagtttctgggggagagtaagagcctgtctttgggggatgccttgctcctagttgcaaaactacctcttgtcataaaaataaatgtttatttttccctcatttaaaagtgattaccaggtgaatttaggatgaactgtgtgtaataaatggtgctatcacattctctcacttgaggactagttattatataccttgagagcatgtatgtaatgaattgtatctgcttggttatacgaaggggtgagatttctttctgtctttgcaatctctttgtgggttgtctgtgatatatagcacattctgatttaatgcctattcaatttttaaaaactgttttctttctctgctacctttgtgaagaggttttctaggttgggagaagattttggtttaaattaaatttccccagcaatgttcattatagcattgtttgtaatagtgaaaaatataagtactttaaatatccatttgtagaagaatgaattatcataaaataatacaatgcactaatatacagcagttaaataaataaattagcacactatgtgtcaaaatgagtaatctcaaaaacataatattcaatgaaaacatagttgcagataatagaagtatgattttgttttcataaaattgaagatactaaatatattatgtatggttatatgtaaaaatagtaaatatataaaaataacaatagggccagcatgatggctcatgtctgtaatcccagtgctttaggacactaaggtgggaggatcacttgagtccaggagttcgagaccagcctgagaaatgcacggagaccttgtccctaaaaaaaaaaaaaaaaaaaaaaatagctgattgtgtgtgcctgatgtctcagctactcaggaagctgaggtgggaagatcccaggagttcaagactgcagtgagctgtgattgccccactgaactctagctggagcaacagagtgacactccatctctaaaaaaaaaaaaataaaaataaaaacaaataacaataggaagcatatccaccagtgtgcaattaccattacctgtggtgcagaagggaaggtaatcattttgggaataagaaaaaggagagtttgactgtatctgtaatattttatttatatgaagcaacatatagctagattgcaacatataggtagtaatctggcttttagatacagaaaataatatgacttagattggtgggtgttcatcatattattctctctacgttttaaagttttcatgacaataatattctcataaacaaaaacagagttcctggatcaaagaaaaaccattttagaagacgttttcttccaaaagtttgaccagtgagtggaaagtatttcaaacatattctctacacacaaaatctgcagacctaactctctttaccgaggaggaaagctatctctcattctcagtttggcagggcaatctcgtgatgggaaacatttcctgtgggttttcaggggccagtgaagaagtagaacaaagtacttgctacctgggttacctgttaagaccacagatcccgccagagcatatcctggtccctgtgacgccatggaacccagtagtcagcctggggcaccattcctgttaccggaagggggtcccgagccagactccaagagagggttcttagaccttgcccaggaaagaattgggagtgagtccatagaggaaagtgaatgtaagtttgttaggaaagtaaaggaataaagagaccaaggtgggcagatcatcgggtcaggagttcgagaccagcctgaccaacatagcgaaaccccatctctactaaaaatacaaaaattagctgggcgtggcagcgcacgcctgtaatcccagctactcgagaggctgaggcacgagaatggcttgaacctgggaggcagaggttgtagtgagccgagattgtaccactgcactccagcctgggagacagagtgagactccgtctcaaaaaaaaaaaaaaaaaaaaagaatgaagaacgtctccttcataggcagagcagcagcatgcgcagctccactgggtatacttacagttatttcttgaccatatgctaaacaagaggtggattattcatgagttttcctggaaataggtggggatttgccccagaactgagggtccctcccctctttgaccttataaggtaacttccagacattgccatggcatttgtaaacagtctggcgccggtggcaatgtcttttagcatgctaactcattacaattagcatatactgaggatgactgagatgactttcttggtttttagttttcattgtaggtttgggggtacatgtgaaggtttgttacacagataagcacgtgacatgggggtctgttgtgcataatattacatcactcaggtattaagctgagtgcccagtagttaccttttccgctccgctccctcgtccctccctccccccacaagtagatcctggtgtctgctgtttccttctgtgtgttcataagttcttttttttattattattacataagttcttatcacttagctccatttacaagtgacaacatgcagtgtttggtttctgttcctgtgttagtttgctaagaatgatagcctccagttccaaagacatcatctcaatccggaggtcactttcattgccatcttggttttggtgggttgtggctggcttctttactgtgtcctgttttatcagctggatctttgtaacctgtatcttgtgtcgacctcccctctcatcctgtgactattcctcctgggaatgcagcccagaagatctcagccttattttacccagctcctgttcaagatggagtcgctctggttccaatgcttctgacattcccatctttgttattactgtgaatacttttttcaaagtataatatatttatgatatcagttattaaggagccctgacactgagataaaccttgttagcatctgctgctcactctggatgcctgccctagtgggagagcccttatgactcccatcctactctgcttttctattgttctgcaacacattgaggaatccaaagagatcctagagataacccatcctcagtcaacacattttcctctctccttttcttctcttctcttctttctttctctctctctctctctctctctctctctctctctttctttctgacagggtctcactccgtcaccctggctaaagtgcagtggtacaatctcagctcactgcagcctcaacctcttgggctcaagtgctcctcccacctctgcctcccaggtagctgggactacaggtgtgcaccaccacgtctggctaatttttttgtatttgcagagacaaggttttgccatgttgcccaggctggtcttgaactcctgggctcaagcgatccacatacctcagattcccaaagtgctgggactacaggcatgagccactacagccagactcctcttttcaaaggttgtcctgaaatgttctcgaaaataaaatagctatcaacagctgcagtcttaacccctatttcttgcagctggaaggtatcagaatatgccatcccaaaatatgcctcattggcatgtggatgatattgagccaaaggcaactgagaaccaacagaggaaggaaaggccctttaccttctcccaactgcctgaaaacagagtatacatttcccccttttgtaacagaaatttccatttataaaggacatttttgtctctaaaagtgtcgctgtatcaggaagagagtttcttcctattacctggaaacaacacttatctgcacagcaagaccgcactaatttaccatgaatttcctctctttaccttccagaattcctcctcccacccctccaaagccccatattctttttttaagcctaaaatggtatagaaacctcagtcatctgaccacttccttaagtgtcaattttttgtgaaactcccgtgcccacatatataattaaaccttttttctcttgttgatatgtcatttttcagtttaatttcctgggccccagccagagtacctaggagagcagagggaaatggtttgctcctcccctacactgccccaagatattaacaggacgtaaaagcatattctcaagccctcatgatataggatttttcttctcggtcactttgccagccgaggatccccagcaggcaacgctccagctcacctgtgttatagcttgtacctgcgtttggcagttcccgagctcttgtattgtgctcgagaaaaatgaggatatgctggacactgaagtgcaaggagggcggagaagaattttattgagtgatggagcagctctcagcagagaggggacgcgggagtcgtccccgacccccacagtcgggtagttcttctgtggctgggtccagagctttgtatggactcagaataggggagtgcatgctgattggtttgtgagtatgcaaaaaaggttaaagcaaagacatcactcaaaggtgggcgtgacagtgcagagaaccaattaggaaagggtaggtatatgtaaaataggtaaagggtggggattaatcagaggaaagtatgccaaatgggaagacaagttctcagtccggtttgaagattgaacttgtgcttggcttttaggctttaaactgtcttcagcttggaggtgaggtttcaccgggacctgcccctattggctaggcatgtgactgcctcctgctgctatcactcatatggaactattttcttcaatgtttaaatgtttttcatttctacttggcagcttttcctttatctggtgtttattgttttagtagttctttcaaaacaaattgattgtgaccaacttttagaaacattaggggaagagtggggcatatctttgtctatggtccttaatataatactgtttgtgtaagggcttcatggaaactgaaaaacgaagatatttatcatgaatttagatataaaagttcatcaaaactttgtcctaatgagtacagtacttctgaaaaacattctccattcttcaagcaagcttgtactgggcatgcactgttctcagggctgccagtataaagtgtaggggagaaaaacattctctgactttctacccatcttagtttcatgggttagggactgccaattagacagacaaaagatagattagcaagagataaacaaacagaaattcattaacgagtgcattgcccatacacacaggagtactcggtaacgaataggtcaaacaggtggctagaacctgggtttatattttaccatcttaacaaaagaacaagaattttgtagagaagtagcaacacaagggaaaggggccttcagttctaaggccagcaaattgtggaaaggtaaatcgatgaaggaaaacaagggaagacaagggctattagtatggttcattctgtagattcctctcttacacagattctctgggctgggaagggtctctagagagttacctctggccattgagagttatcctgcccttcccggtagagagggggaggtcagagagtttttcttgcatctgttctttttaattgctttcagctcaaaataatcctatttcaaagtggcatattttggggtggcacattctgaactccttcaaagcaagggagaaaaacataatccctgactccgggtgtaaagtacaatgaaataattcatattcaaaaggaatttgatccctttgataatcagacttgggtttccaccagaaactgatacagctatttgtcaagaactggttgcctggacttataggaaatgactcttgaatactcaggcaagaaatttcagattctctgaaaaggtgactaccacaatgttccatttagagttcaaccatttggagatgtacatgactgacttctgtgcactctcaatttttgcaaatatatgaagaaccaccccccactgagtttttcctctgtagagtgtgaaggtaaaccctcaccccaaaatatggctccctgatatcacaagtattttgaattaaaggccctcagagatcaacagacattggaagaggcttttctcccatctatatcaagaccagatgaacctaccaacaagagcatttttttttaacctctcctcctgctatctcattatctatcgcagaaaagattaagaatgaaaccacacctgaactgactccataagctattatctgtctcttgggtttattcagcttccaaagggaaccatttacaggttaatctccattgcccaatccattcattcttccaggtaatcatttattgcccctcaacagtcacgtatattccctatccacccgtcccctgaaatgaggccatacaggtatctggactccagtgggatattgggcagtcatcctgtgaatctcccctgtgcacatgttaataaactggtatgccatttttccagttaatcttccctttgtcaattgattttccagggaaccttaagaggacaaaggggaaattttgtcttatcccctgcaagtgggaagggtgaatattcacagccagctaacttaatgaaaaatctcacagaaaacatgactggctgaagcctaaagcaaaataaaatcttcaaggggtctcagagctacagaaagtagtaggaacatggtgatctctctcctgacaagcgtacggcctcatcatttttctatgaggatgtcacaagaggctccctgaggatttgatcagcactgttgtcgggcaccaagttcaactgagtgttcctgatgaattaacatgttaataaagttaatataagggtggcattaataaaagggtgcttgccgggcgcggtggctcacgcccataatcccaggcgggtggatcatctgaggtcagaagttggagaccagcctggccaatgtggtgaaaccctgtctctactaaaaatacaaaaattagccaagcatggtggtgggcacctgtaatcccagcttgggaggctgaggtaggataattgcttgaacccaggaggcggaggttgcagtgagctgagattgtgccattgcactccagcctgggcgacaagagtgaaactctgtctcaaaaaataaataaaaaaaattaaaaaaaagttaaaagggtgctcttacctaaaggcaactctcattagcatagacagacaccaaaaatagttctatatggtcaagagatgtttatatttgcctgttatctatataattgttggtctacttagacataaatttccccttcatttaggtgcattaaaattataaagaaaaatttatcttggagatttccattgaaagggagaaaaaaacctttattcctctactcccctaaattctctggctggacctgcaaatcaaactgacagattaataaaagaaaaacaaagttttagttacacacatatgtatggatgtttcacaaagaaatgaactcaaggaggtggtcagataattgaggcttacgtacactttaggccaaacaaagcaaaagaggtttggggcttctgagtgagggaaggcaagttatggaaaagagaatgaggaaatgcaggtaaatgcggcctgtcttgctatgcaggtgagagtctgaggtggaaagagttgtctctgtggccaggtgcagtggctatgccagtaatccagcctttgggaggccaaggcgggaggactgcttgagcctaggagtgcaagaccagcctggataacagtgacaaactgtcgctacaagaaagaaaaaaattagccagatgtggtggtgtgtgcctgtagtcccagctactcaggaggctaaggcaggaagaccaccagagaccaggaattggaggttacagtgagctaggagggtgccactcctctccactctttagtaacagaggaagatcttctcactaaaaataaaaatataaataaataaaaattatttgtaattccagcactttaggaggctgaagcaggaagattacttgagcctaggaatttgagaccagcctgggcaacataaacagattctgtctctacaaaaattaaaattaaaaaattagccaggcgtggtgacgtgctcctgtagtctcagctactccagaggctgaggtgggaggatcacttgatcccaggaggccaaagctgcagtgagctgagattgcaccactacactccagactgggcaacagagcaagaccctgtctttaagaaaaaggaggggggttttctccaggagtagctgtcttccaggtacagaggcccctctcccaatggaagttaccttcgtaagtgtaaatttcctttataaaaggggaggttgatttttcacgcagacagggaaggtaaagagcttttccttcatctgctggctctcaattacttagtcaaaagaatccctatgcctaagaagtgtattttggggtggcatattctggtacctttctccaccctccctttcagagccccatatccctttgggcaacagctcttgaccattaggatctgctcttggttccttacttgagaccagtcagtcattcgctattatgaatgtttcatggggaaccttttctctaatgatggaatgaaagacaagttatagaattctaaatgttaacaggcagctttgtcttggtaccacggagatgctacacaatccagtgtgtggcttactgatatccaattcattcatttggtaaaaatcaattatcttaattaacactccataagtattgccagtatctactaaatctaacttaggttttatttatgagtttgaatggaagtaattcacctcaacatgtcccagaatttcaatttttctgcatgacatcagagagagtatgatagaatttattctttattgcattaagtctggcagaacatcattggaaagtcattcctccagaaatatttattgaagattctcgatatgccaaaatttttatgcatggaagataggagaaaagctgcatgagggtctataaaatcttttgaaagttagttatttcactgggaaatgaaccatgggaccatgttaattagctcagatgacattctttaatggtagagtcagtgctgataaaaagcaaaagactggaaaatgtaaacacagcatttaaaatctaattccatgtcagtgctttgggactccttttcgttaggctctctctctaggggaagtctttaataagtctttatcaagtgcattctgaggggccacattttctacatttgcattaggagattgaaagcaggtttataacttttaaagatcaaattacttctatgcattttatgtgccccaatttcaagtgtaaagggcacatacaaaactatgaagagggacagatggcaactggactttacataatgcttgaaatagacacactgatgatcctaaacacatttttagatatctaaagacaaaaatcatcattgaaatagaatttaagtgaaacaagaaaattttaaattaaatatatattatatatatttagtacacatatatttaaaatcatcttgtttcacttaaattctatttcaatgatgatttttgtctttagatatctaaaaatgtgtttaggatcatcggtgtgtctatttcaagcattatgtaaagtccagttgccatctgtccctcttcatagttttgtatgtgccctttacacttgaaattggggcacataaaatgcatagaagtaatttgatctttaaaagttataaacctactttcagtctcctaatgcaaatgtagaaaatgtggcccctcagaatgtacttgataaagacttattaaagacttcccctagagagagaggaatatatatatgtaggtgttttggtagagacagggccttgttttgttgcccaggctggtcttgaactcctgggctcaggcgatcctcttgcctcagcctccgaaagtgctgggattataggtatgagccactgtgcctagccagacagtttttttaaaagaaattcatcttcacattgtgactatcaatgtatcatactaatatctgaaaagctcatacagattcagagttcaaccacctcactcccctaaccgcacccccctccccccacccgccaaaaaaaagaataaaaaaagaacagtggtctcttctgttaaagaaaagaaaaacaaacctaggagaaaccaagtttggagacaacagatgatctgttgctactggaggccatctcttcataaggaaagagagcatcgccactgcctcgggctccagtcatgcaggtggccctatgtataagtcactcagtctacctgaagcaaactgctcctcccagaacagtgagaagagggcctggtaaccaaattacaccttgctgctttttctgctctcactcttttcttctggttcacatgagaagaggggattctgaatcataaactagatctagaagacatactggctatagtttttggttagtgaaacataaacagaaatctattttgatttgtattctcattcttaaatcaactttctcagacatatcaacaccttttttttggccaaagtacaatatggcaaatataatttactatttcttatcaaattaagattgtgatctatctcaaggtcacaattaaacatgacgtgtgctttttaaagaataattttagttacaaatatataaataaggccacctgtaatcccagaactttgggaggccaaggctggcagatcacttgaggtcaggagttcgagactagcctgggcaacatggcaaaaccccatctctattaaaaatacaaaaattagccaggcacggtggcacgtgcctgtaattccagctactcaggaggctgaggcaggaggatcacttgaacctgggaggtggaagttgcagtgaaccaagatggtgccactgcactccagcctgagtgacagagtaagcctccatctcaaaaacaaacaaacaaaaaaagaaattacaaatatataaataaaagaaacagaactagtgaagctcagctcgtttcctaaaaagtaacagtgaaactggaaaagggaatcccagattcaccccaagcactcattcccacagctgctgggagggtcaacgggttcagttctgcttcctccagcctctctcaggtgcaagagaggaaaaatatcttccatctacccttgtaagttctcagctgggaaccccttcacaaaagacagattaataagagaaaaagcatagaaatttaattaatataagttttacatggcatggagatgtccatgagaaaatgaagacacaaagaaagggttaaactggggtgtgtttctgctgtttgatgaagagtggaaagtcctggggaaatgtgacaggacagaatatgggctaagagcacgggctaagagtatgggctaagaggggtaaacggggggacacttggcagggctcatttgttctaattactctcaatacccctctgtctttggagataagaatgttgtcctccaggtctaggaaggcacctctcacatgagggtcttatcgcctgcttcaggaaagaaggacagaggcaggttggagagaccttcttgccatttctcgaattccttcagcttaacatattcactatgccaaggtgccatattttggggttgccctgaaccccatcaaaggcattgatttctagcgcactctcccataaactttctgtacccaaatctcagtctccaagactgctttctaagaaaactgttttgtgtctgtgtacatgtaagtcagtaaatataaacatcagtgaagggcaacgcatcacaatgctgaaacatctttcaaagaagtaagattaaggcgatgaacttgaaaatgattttgtaattgtcttacaaaatacacatccatgttatccttgcaattttgttttccatgtaaaacatgtcacatgactgaaaaggttctcattaacctattaagaactaaaaaccaccattgagctcaaccaggtgttcttattctcatggtctgacatgtcttcctctccttccccactctccttcttccccaatagtcttcagacattcagttaactatggtatgtgctctttttctcaaggccaagtatttccaagtctcctcttatatgatgtcttatataaataaatgtttaaagtatatcaatataaaattgagataatggaaatatttactgttcctatcacttcatcttttcaaagccaactttaacagcaaacactattggcctcgcaaggcaggagatctgaagacggatatattaaataaataattttgatatgtaccttgagccaagataataatataagattgtgaacactcgctgggaaaaataacgatctggtgtagaaaatgacaggatatttgagaaaatataggtatttttctggacaaaagtaaacattaatgtatttatgagatgtttctcactgagaagtaaactctgaccttttttctctcttgcccatattcctatctaaggggcctgcggagtcacgactacaaaccacgactacaaaccaaaacatctcatcaggtgggctttatttcaccctatataatgtggctcactttccaacccaacactggcataacatcacatgaaagataaagaaagaaatcaaaatattttaccccaaaaaatatgtagggcttttcgccatattttaaaatggccctgcagagtcttttgtgggggaaatttttgtccgtgaagaatctctgttaacacaactaaatcttccccttccaggccctcccaatcctgaagagattaattgagaatctatttctatttctattttttatttttatttttatgtttgtgttttttgagacaggatctcactctgtcactccacaggctggagtccagtggagggatctcagctcactgcaacctgtgcatcctgggctcaagcaatcaagagtccagcaccttttaaaggtttgaagaggagacattcaccatctattgtatctaagggcagccacctataagatttcataagaacctcagtgtccacagccccttatgttaacccagacactcctttctattgcctctattattctatttagataataactcttttaaccaattgccaatcagaaaatccttgactccatctacaacctggaagctccctcttggagttgttctgccttttcggactaaacctcatgtgtattgtatatgtctccccaaaacatataaaaccaagctgcagcccaaccaccttggacacacgttctcaggatctcttgaggccacgcctccggccatggtcactcatatttggctcaaaataaaactcttcaaatacagagtttggctgtttttgttgacactgtagggataaaaaagctattacataatatttgactgtactgactgagttataatttacaaaggacagaattcaaataaataagaaggaaattctagagaggcagccttgttgactgaccatcttgctatctgaaatgttcaattgtgggaagtggaaatggactcttttcctacaccatagacgaggctaagagtaggcaacaaccggccatgtactacacgcagatggatggcagagacagccaggacctggataaccttgataccctagaaagagacacactacctgtgaagtatatgtacccaaaagacaaaaattatctgaatctaatcaaggacttggatctaataactggtttcaaaaaataccaatgagagctgggtgcagtagcccatgtctgtagtctcagctactctggaagctgaggtgggaagatggctacaatcacgcctgtgtacagtcactgcactccagcctgggcaacacagtgagagctcgtctggtaaaaaatacacatgtaggtgatgaaggaaaatgatgccatggggacataatcaacaaaatctagaattggaaatttctagatgtaaattattaggtttcttcaacaaatagcaaggaaaaaagaagacggagggaaatcacagattaaagaaaggtgatacatatgaagccaatgtgatatgtggtccttgtttagatcccaatgcaaacaaaccaaatataaaacaaacatttctgagaattgagaaaatctgcacactcaccagatactggattatattaacattattgtcgattttagggctattaataatattgtgtttatgttaaagaaagaatccttatgttttagaaatatatgttggagtgtttctggatgaaatgatatgatgtctggaatttcctttaaataatttgggaggtgggagggtgggtggaaaagaaacagatgaaataacagcagacaaacggcagtgattgttgaaggtgggtgatggctgtgcagggtgggtgaactgaagaaaatgatggaggtgattttttttttcttttttttttttttgagacggagtctctctctgttgcccaggctggagtatagtggcctgatcttggcttactgcaacctctgcctctgggttcaagtgattctcctgccttggcctcctgagtagttgggactacaggcgtgtgccaccacgtccagctaatttttgtatttttagtagagacagggtttcaccatgttggccaagatgaatctcttgacctcatgatctgcccacctcagcctctcaaagtgctgggattacaggcgtgagccaccgcgcctggcctgacggaggtgattttaatccatttagaggtttattttgccaaggttgaggaagcacctggcaaacagagacacaagccactgtaggatctgtggcaccccctttttctgaagaggattttgagggctacaatatgaaaaggggaaaaggaggcaggaggggaaaagaaggaaaaggagagggagggctggtcacgttctttagaatccacatgaaaaggagcgggtagatgaaccgtcaattctgcattcatctcctgctcagtacatctgtactctacataagataaggtgaacttcagtagaggaagcaactgaatatgcattcgtctcagggtgcgcagcgggacaatttctaggctcctctcgtcccgtactcttgaagataaactgttaatttacatggtcagagtgagggaggcccctgtggaaacatgtggccttctatctgtagctattagtttaggagcaaaaggaaaggcagggttttttggttttttcatgactcagttttcaagcttaacttttccattttggcatagcgaatttgggctcccaagattttgtcttcctttcataggagaaaaaataatttcttttctcaatccttgtaagttcattagtgggacagattcctgttagcagaagacagattaacaagagagagaaaaaaaagcatttttatttacgtgtgtgtctatcccatggggagaaagctgagttcaaaagtaaggtggcttagggccctggcttacatagcacatctagcaaagaacaatatattcagaagtgacaggacaaaggaccaagcagctccaggctcccaaaagtgggacaactatggaaaggtaataaagcctgctcccagattcctctggccctgctggcgccagcccctgcactgataagtgaaccactacttacatctctgtcttcaggcagataggggaggcagaagcttctccgcattttttcacagcaatttttatggcctgccttaggtaagaaagggcagctcagacagccctttcctgtaactttactttccacttgccaaagaagcatatttcggggtgaaatattctggtgttcttcagatgtatggggattcataagattattttctctcctgctgtctaaaattccacaatgaagaagttaaaaaatctctactgtaattaaaagtaaactgaaaaatattacagttatagtgaattaaataattgaagttttcatataaaaatgcaagtttttagaatctatgcatctgaaggatttttttaatctaaaaattgaatataaaatatgtaaattatgttcttttctaacctaggatgctacttattaaaaacctaaattattgctataaagaaaataatagagatattttagttcatcttaattatatattttatagtttggttttttgttttggggtgttttggtttttattcattttatttatttatttatttatttattttgagacagggtcttgctctgtctagagtgcagtggtgcaatcatggctctctgcagcctcaacctcctgggctcaagtgatcctcccacctcggccctcaagtagctagaactacaggtgctcgccaccacacctggctagtttttgtgtgtttgttttttttgtttttttggtagagatgtggttttgccatgttgcccaggctttaattatatattacatagggactatcaaagacactgtcagtgtaaacatgctagaagccaatataagccactccaaacaagcagtgtacctacatgacagcttttcaatctaagtcgtgaggcttggtcagagttgtgcctgaaattattgaattttatttcatttcttatgcactgttatagcattagtaaatgtattatgcactattacagcattataattcttatgaaataaaacatactctgtatgataaaacagatgctgagttctacagaaactcttcaatttatattaccccagcaaaatatcagcaataatggctaacaagtatggagtactttccgtagtgtctaatatattactgcattacatcagtggagtggtattattagtgcttctctttcttctcaggctgaggaaccagcagatgagagggttcatgaaggaaccactagttccagaagtgctggatcctgccttaatcatcattccaaagactctccttatgatgataacaattagttgaactcactttctagaatccaaaattgcaatggttctccaaattaatacattgtatcatgaagtaaattcaccttatttattactgttttgctttcatccaccagtagagggagtacaaattcacctataactgagtccaaatcccaaaaacagatttagggaatgacaggatcaggcaggagtttaactcctgtatttttatgcgttaaggaatccgaggtgacagaggttgggtgagttaatgcagttacatggttggccaatggtggggccagatgaacaattcgcaccccctggcttccagaacaggctggttttaccaccggtgaggctggtcctttcagtggatatcaggtttccttcctagcccactgggtggtcatgtggaatatttcagaaagccaagctcagtttccctcaagaaacgttagtgaccactagtttaagataaatttttatttggctatggtgaaacagctgatcatataattcccccaaatgaacattaatttagcaaattaatatactgcacaaataagtatacaaaagcaaaattgagagctaaatgaagacaaaattcctctctgggtctttcaaaaacacaatttatcagttgagaactaattgactgtttacaactggaggtgagaagggtgtattcacagatgtctgcctgagaccattggataaaggggatgagttccagttaaattttgaaaaaaaaaaaaggggaaatagcagggcacggtggctcacatctgtaatcccagccctctgggaggccgggacaggcagatcgcttgaggtcaggagtttgagaccagcctggccaacatggcaaaaccccttctctactaaaaatacaaaaattagccaggcatgggcagctgtagtcccagctactcgggaggctgaggcaggagaattgcttgaacctgggaggcggagtttgcagtgagcggagatcgtgccactgcactccagcctgggcgacagagtgagaccccgtctcaaaaaaaaaaaaaggtgtgtgtgggggaggaggggaacaaaacaaaaagctgaccctgaaagtctccttactactcagtttgagagacaaaaactccagctcgcctgttgtttatgctcatgcctggctctccttccactgcctgccgtacactttgctggggcggggctgactctgtctccttaggggcaggactgtctataacactgtcttaagttccacctcttctatgcctgggaggacacacctgtttcgtgttcatttgcattcccaacttatctttcttcttctcctggtggccacaggaggtgctttgtcggctggcaggtccattttgggtattctaatccaggcttctgactaggtttggtagctattctcattctcattttacttcttattcattctaactctcattctactattttttacttagacgtagttttcttggtaagaaaggccatggtaagcagacgtagtgtgcacagaaatatgcagcccttctgggtgcctggaccccagtagcaccatagtcacccgtaatagccacataatagccacgcctagttctaagagtgagtagagttggaccaagttgtgaaacttcaagtttgcttttgtttttagtcgaggcctaacctaggcttggctgggcacttttttcagggtgctagtgttgtagaacctctgagagcagcgaaaggtttataagatttggccaaggccagagggcgggagacaaaatctcgcaattctgacctgcctttggacataattgaggctttatgaggaaggtggggatgcgggagtggcgatcccatgaccaaagctgcttgcctccctcggtcccttggccagatgaaacttctggatgccttcaaggatgtctatctgaccaaaggatcttgttctttaaagataaacaaagccgggcgtggtggcttatgcctgtaatcccaacatttcgggaggccaaggcaggcagatcacttgaagtcaggagattgagaccagcctggctaacatagagaaaccccatctctactaaaaatacaaaaattagccaggtgcggtggcatgcgcctgtaatttcagctacttgggaggctgcggcaggagaatcgcttgaacccgggaggcagaggttgcagtgagctgggattgcgccactgcactccagccttggccacagagtgagactccaaaaaaaagaaagaaagaaagaaggaaggaaggaaggaaggaaggaaggaaggaaggaaggaaggaaggaaggaaggaaaagagagagaaaagaaaggaagaaagaaagaaggaaggaaggaaggaaaagaaagagagagagaaagaaagcaagcaagcaagcaagaaagaaagaaaggaaaaagaaagaaagaaaaagaaagaaagaaagaaagaaaggaaggaaggaaggaaggaaggaaggaaggaaaacaagttcatcaatctcgcaggcagaccctggagggttaggatatgaaggtaatcaattattagcaactcccctccaccagaatgacttcatgccagcaagtgtgcacagggagaggagaggacaaagagagaggaaaataagcaaaacagagagaggaaaataagcaaagcaaacaccttagggtttttgtttgtttgtttgtttttgtttttttgagacggagcttcactcttgttgcccaggctggagtgcaatggtgcgatcttggctcactgcaacctccgcccgcgccctccccaccccacccccaggttcaagtgattctcctgtctcagcctcctgagtagctgggattacaggcatgcaccaccacgcccagctaattttgtatttttggtagagacagggtttctacatgttggtcaggctggtcttgaactcccaacctcaggtgatccgtccaccttggcctcccaaagtgctgggattacaggcttgagccaccgcgcccggcctagggtttttatactataggctcagtcgcactagcctggtctccttttgcctccaggaagccgtgtgcaccacctacatgctgtaaagatcaaagaatgcacttatctaggccactgctgtcatgtctccatttcttttttgttttttgctttttctttttttttttttttgagatggagtctcgctggagtgcagtggtgcaatctcggctcacggcaacctctgcctcctgggtttaagcaattctcttgtctcagcctctggagtagctgggactacaggcgcatgccaccacacccagctaattttttgtatttttagtaaagaaggggttttacttcattagccaggaaggtctcaatctcctgacctcgtgatctgcctgcctcggcctcccaaagtgctgggattacaggcatgagccacagcgccctgtgccatgtcttcatttctgcaaccaacacctccatgctcaggtcttccagtcttccagctgtgatctttctcaaaactgacactgggagtgaagcaagccttggaaggagtgacaaatacacccatcccctgcagcccccgcagaccccattcatcgatcacagctctccttccaccactcattgatcacagctctccttccaccactcatcgatcacagctctccttccaccattcatcgatcacagctctccttccaccattcagtgatcacagctctccttccaccattcagtgatcacagctctccttccaccattcagtgatcacagctctccttccaccattcagtgatcacagctctccttccaccattcagtgatcacagctctccttcccccattcagtgatcacagctctccttcttccattcattgatcacagctctccttctcccattcatcgatcacagctctccttccaccattcatcgatcacagctctccttcccccattcatcgatcaaagctctccttccaccattcattgatcacagctctccttccaccatgcagtgatcacagctctccttcccccatgcagtgatcacagctctccttcccccattcatcgatcacagctctccttccaccactcattgatcacagctctccttccaccactcattgatcacagctctccttccaccattcagtgatcacagctctccttcccccactcattgatcacagctctccttccaccattcagtgatcacagctctccttccaccattcagtgatcacagctctccttccaccattcagtgatcacagctctccttcccccattcattgatcacagctctccttccaccattcagtgatcacagctctccttcccccattcattgatcacagctctccttccaccactcagtgatcacagctctccttccaccattcagtgatcacagctctccttcccccattcagtgatcacagctctccttccaccattcagtgatcacagctctccttcccccattcattgatcacagctctccttccaccattcattgatcacagctctccttccaccattcattgatcacagctctccttcccccattcattgatcacagctctccttccaccattcagtgatcacagctctccttcccccattcatcgatcacagctctccttccaccattcagtgatcacagctctccttccaccattcagtgatcacagctctccttccaccatgcagtgatcacagctctccttccaccattcagtgatcacagctctccttcccccattcattgatcacagctctccttcccccattcatcgatcacagctctccttccaccattcagtgatcacagctctccttcccccattcatcgatcacagctctccttccaccattcagtgatcacagctctccttccaccattcagtgatcacagctctccttccaccattcagtgatcacagctctccttccaccattcagtgatcacagctctccttcccccattcattgatcacagctctccttcttccattcattgatcacagctctccttctcccattcattgatcacagctctccttcccccattcatcgatcacagctgtccttcccccattcatcgatcacagctctccttccaccattcattgatcacagctctccttccaccatgcagtgatcacagctctccttcccccattcattgatcacagctctccttccaccattcatcgatcacagctgtccttcccccattcattgatcacagctctccttccaccattcatcgatcacagctctccttccaccattcatcgatcacagctgtccttcccccattcattgatcacagctctccttccaccattcagtgatcacagctctccttcccccattcatcgatcacagctctccttccaccattcagtgatcacagctctccttccaccattcagtgatcacagctctccttcccccattcatcgatcacagctctccttccaccattcagtgatcacagctctccttccaccattcattgatcacagctctccttccaccattcattgatcacagctctccttccaccattcagtgatcacagctctccttccaccattcagtgatcacagctctcattccaccattcatcgatcacagctctccttccaccattcagtgatcacagctctccttccaccattcagtgatcacagctctccttcccccattcagtgatcacagctctccttctcccattcattgatcacagctctccttccaccattcattgatcacagctctccttcccccattcattgatcacagctctccttccaccattcagtgatcacagctctccttccaccgttcatcgattacagttctccttccaccattcattgatcacagctctccttccaccattcattgatcacagctctccttcctgctgagcttgggtgtagtctcagagtccttctcaacatagcattccagacaaccaccaccaaatgtggcttgacactcaagtaacacacatttaccattactgcctgtcaatgagaattagaactggacaccagttaaagtggtggagctgaattttagggagaaactaaactgctgtaataggggaaaagagacttcagcacagaactgagctcaatttgaatacaaggataagtgggaatttatcactaaacagcaggatgggggcatcagtgggtggacagtcactaagaggaaacatcaagggtagtaggttcttgagaaactgactcaacagggtccttgctgagagcaggccggcaggatgggatatcaagagttgggaattcttttgtaggggaggaaaaatatcttttctcctacccttcagagtttgtggctggggaccccgtaataaaagacagattaacaagagaaaagcatagaaatgtatttaatataagtttcacaagacacaggagccttcataagaaaacaaagatccaaagaaacggttaaaccttagtgtttttatgctagaatggatgaagagtggagagttctgaaaaaatgtctgaggacagagcgggagctccatatagtcaactggggaaaatttagcaagtctcattcactcagattcctctcagcatccctccatctttttttttgagatggagtttcactcatgttgcccaggctggagtgcaatggcatgatcttggctcactgcaacctccaactactgggttcaagcgattctcctgcctcagcctcccaagtagctgggattacaggcatgcaccaccacgcccggctaattttgtatttttagtagagacggggtttttccatgttggtcaggctggtctcgaactcctgacctcaggtggtctacccgcctcggcctcccaaagtgttgggattgcaagtgcgaggtactgcacctgaccccctccatctttaaagtcaaggacactccttccctctgggtataaagagatcaccccttacataagggttggataatccgcttcaggggaaggtcagaaaatcatttcaccaattccttcagctaaaatattcaatataccaagtcagtgtgtcctgaactccaccactctaaactgacatagcagaatttgtgataaaactgaactcagcaaagatgaacacggaagaccacggaggacacctgatgaagaagagggctcagaggagcatggccacagtccagttaaggagaaagtctttgtcacgccccagagttagagtacacagccctccctagctaagaaactgtaaataactctacagcaatccatctgcagctccaggtagacaacgtcacctgcaccatcagccgcttttgacaccaggcaattctaggcacctcggcatgctgagtgttttgagcagaaggaggttgagagggtcacagaagcaggttgagagggtcacagaagcaagaaggtctctccaatcttctcctgccctcctttctcctaatcccctttgccctctaaagcaggttgtagaatctagaattcacctcccctgaagcaagccatcaaactcaggaacatcactctctgagctcctcactactccactgaagaccctcatgtggcaggtattgtgtcctacacctggggcgggggaatgaattcatagacacaaaaagaatcggaacaaacaggcctaaaggagttcccccaagtttattatcattagatcacactccctttcatccagtcatgattctctacaactatctactttttttcatcagacttagcataaaaatacacagttttccctggttcttgggccttcattcctgaaggctcttgtgacatgtgaagctttcattaaatatatttgttcaggttttctcctgttaatctgtcccatgttacggaagtgtcagccacgaactgaatgggtgaaaaaaagagattactttttctcctctacagggctcaaggctcagaaaggtatttttcaaaaaagaacttgagtcgtatagctctatttcattttttcctcagagactatatacacaaaattgaacaagcattttataacttgttcaagaaggcaaaaatataggtcactgaaaacatagtcttcttgaattacttttttttccaaactttaatttaatccttgtaatagtcacatcaagaaaagctttttctatccattttcttaccagttgaacactcttttgaaagtggactttcagtcacacagctctgtgtttcagctaataacctactttgcagctgacatacaggaatacaacggctatacaagaaagaaatgttatttttcttttctatggaattgggtccagaaaaatgcctgtgagaaaggctttttgcatggacatttgtcctggcactttttccttattaaaaatttaatggcgtgggccacatattcatattcagatcaactctgggtacttatcccagtagctatgataattaagattttacttttatgacagtctagcagagcacaggttttatattcaatattctgccacttgacaattctttagccagcttttcccaacttcccttctcataagaccccactccagatactgattcaacacggctgacatgcaggctggagtcctggtatttacaaagaaccaaagaaccgcaagtgatgtttataaccagaaaggtttggaaagcaccactccaggcaaatagtcagttttaggggttttaaaagattttcaaaacaaagctaaagattttagttcatttttatttttattttttcaagacagggtccggccctgtcacccaggctggagggtggtagcatgatcatagctcactgcaacctcaaactcctgggcttaagccatcctctctcctcagcctcccaagtagatgggactataggcgcataccactacgcccagctagttttgttttcaaattttttgtagagatggggtcttgctgtgttgcccagcctggtcttgaactcctgctctcaaaggatcttcctgcctcagcctcccaaagtactgggattgcaggtgtgagcctctgtgcctcaccaaaactcaagacttttcaatacagcacacacaccacaaaggacagccatgacagtcaccctggtgaagaggtgaaagcacctgccagctgccgctgcctcagcctgccccaaccccgtgcagccctgctccttctctcattagaagtggcaagggaaggcacggcggggagaggggtagggacgctgtgagcatcctcagaaaccatcgcagtgcctcctgcccagctgcagtggaactgctgcactccaccaaggcagccgagggctctgaggaccagaacagaatacacttccatatgcatttcttccacaattctttgagtgaagcaccaccctctgtacagaatcattataattattcttggatcactcttttgtctctctacagtggctttggtaacagcagggattccagaaacaaggacaaaagcatctggcttgagcaaggaggctgctggcaagactgagggtggcagagctaggaggatgaatgtgtgaggagtggacaggcgacaggaagagaagggaagagagaaggaacagaccggggagagcccctcagtggccagtagtgaactttccccaaatctgtcctcctggcagaaccctctctcccagctcctggaggcggagccaaccccaggcaggaggctacagcaagcagatgtcctggtcactgcctgcacctcccatggtggctttcacagcttcctgccagctccaagccgaccctaaacctccgaaaagcatctgaggaggcagcttacatttgggattaaaacaccagtgttacccctgtcagaaaaatttgcattattcgtgtggcgaacgaaaaataaaatcttaaggcccccactgatcagaccccctcttggccaagggaactccagagaaagcctaaaactgagttccaggccatcactggaagggaggtcaggcacgtctcctcatacccgctttcttttggagcttagacacgacaactgaccagcattcctgtaaaaacaaagatcaggaggctaacaaaacagactctctgtcgtaacaggaagccaaattctaggccgggagcggtggctcatgcctgtaatcccagcactttgggaagctgaggtgggtggatcacaaagtcaggagatcgagaccatcctggccaacatggtgaaaccccatctctactaaaaatacaaaaaattagctgggcgtggtggtgggtgcttgtagtcccagctacttgggaagctgaggcaggaggattgcttgaacccgggaggcggaggctgcagtgagccgagatcacaccattgcactccagcctgggcaacagcgcgagactccatctcaaaaaaaaaaaaaaaaaaaaaaagacagatcttaaacaggatgtaaagccggcagtcttgctgaacaggtcatattgtggctgactctgacacagcatccttatctttttttcctttttttatgctccacagggcaagtcctaagcatccctatcttaacttcaacagtccattctgctaactccaaatttttagacaaagttttgttcctttcaccaactacacattaaagaatctcggaatccacctgtgacctgtaagcccccatttcaagatgtcctgcgcttcctggccgggccaatgcataccttccaggtacggatttgtgttttgccttctcaaaatgtgtaagaccacactgtgacccagccacctcagcagcactaagaccacactgtgacccggccacgtcaggagcactaagaccaccccgtaacgcggccacctcaggagcactaggaccaccccgtaaccgagtcacctcagcagcactaagaacaccacgtaacgcggccacctcaggagcactaggaccaccccgtaacgcggccacctcaggagcactaggaccacccagtaacgcggccacctcaggagcactaggaccacaacgtaatccagccacctgaggagcacttgctcaggaccccttgagactgtttccctgggctgtggtcactcatattggctcagaataaactctttaaaatattttacagagtttggtttttcccactagcaatgtcaacctaaaaggaagaagctgaaacaaaattaatgtagtagagagtttatttgggctaagcttgaggactgcaatctgggagcatagattcaagttgccctgaatatacatcccaattagcagatgttgtaagtggattttttttttttttgacagaatctcgctctgttgccagggtggagtgcaatggcacaatctcagctcactgcaacctccgcctcccgggttcaagcaattctcctgcctcagcctcccaagtagctgggattacaggcatgcgccaccacagttggctaatttttgtaattttagtagagatggggtttcaccatgttggccaggatggtctagatctcctgacctcatgatccacctgccttggcctcccaaagtgcaaggattacagatgtgagccaccgcgcccagttgattttttcttttttttttacagggtctggctctgtcccccaggctggagtgcagcctcaaactcctaagcttaagtgatcctcctgcctcagcctcacgggtagctaggaccacagacacatgccaccgtgcctagctgattttttgtatttttttatgtttttgtagagacagggtatcactattttgcccagggtggtctcaaacgcctggccttaagtgatactcctcagcctcccaaagtgtcgggattataagcatgagccactgtgccctgcataggtggatttttttttttcgaagtctcgttctgctgccaggctggagtgtagtggtgccatcttggctcactgcaacctccgacttcctggttcaagtgattctcctgcctcagcctcccaagtagctgggattataggcacacaccaccacgcccagctaatttttgtatttttagtagagacggggtttcaccatgttggccaggatggtctcgatctcctgactttgtgatccacccacctcagcttcccaaagtgctgggattacaggcgtgagccaccgcgcccggccgggtggatttttaaaggtgataaagggggacggagagcgtgctgacagggggacggagagcgtgctgacacgaagtggctcctcaggaatcctcactggtctacagaaataacattgattatggtgggtcatagtgtccgggcatggcatccttaggtacatgtatagcttctgtggcaacagcaagcagtttcgagagatgaattgcgagatcaaaaggggcagcaggctgcagttgccatctcattttaccatctctctgagtctgacaattcaaaggacttgcattcctcagacaaaagttcccctcccctcccctcccttccccccgttccctccccctcccctcttttcttttctcccttcccctccattcccctcccctcccatctgtcttctcccctcccctcccctcctctcccttctccttcccttccgcttcctttcctttcttcccctttcccctttcccctttcctttcttttcttttcttgaggagactccgggaaagcgaaagacagaattgtggcaactttctggagcagaaagttctgaggcaaggaaaagcccttatgtgcgatgcgagggaggctgcacagacctgggtggctgcccacagcttctggagcctggccgcagcgcctctgaaggcaatgtcacatagggaacgagtcacgaggaagccagacaggcacaagcacatggacgctttccaccttgaagatccagggccaccttcctgccccctgggggcacagcggtctccagtccctggagaagctccagctggggatactgtcaacccggtaaccagcacggcgctcctgggcagcccgggaccagctgtaaagtggtgatggcaggagaaaccctacagggactggctcacacacacacagggactggctcacacacacacacacacacacacacacacagggactggctcacacacacacacacacacacacacacacagggactggctcacacacacacacacacacacacagggactggctcacaggttttaagtgaaaggaagaaatcaggagttctttccttttttagcaatttgaaactctaagaaaaaggctacagtgttgtattaatgtctcaccactcccacccccttttcaagtgaaataaagaatacaagggaagccagaaaaatgctgaagattttggcaatgaagggtctgaccacaaagaaagccaatgtgccacttgtgtggatttttgcagaaagagtaaacagccttcctgcaagacacaggctgcagagggttccgttttcatggctggctgccacagaattggcttaggctggatggactgagcagagcatggggtctgagccgagtggcgtgagccaggggtccagagcagacacggggggcgtgcacgccatctccagagtcgcacagggctgtgcgtaggcggccactagggtaggtcacgcataaaagttgctttgtatctgcagcacgaacaagacttaaagaaagatctgttttataaagacgaagcagtgctcagtatgtcatttaggatgaagaagaaggcagggaaagcgttcattttagaagtgctgtgaggatggtgcaggacgcagtggggcggggggagggtgcattccgcccggatcttccctcccctcacttctgtgctgccctgcctgcatgccctcacgcccaggctagtttccactctgccacaggcagtgaagattggatccgctgatggcagcatcttggaaacaggaaactgacaggcctctgaatatgccatcctaaaatatgactgtctgagaccagactataccaccccaaaatatgactgtctgagaccacactataccaccccaaaatacgactcagagatcagactatatcaccccaaaatgcgactgtcagagaccagattataccaccccaaaatatgactgtcagagaccagactatactaccccaaaatacgactcagagaccagactatatcaccccaaaatatgactgtcagagactagactataacaccccaaaatatgactcagagaccagactatatcaccccaaaatatgactgtcagagaccagattataccaccccaaaatatgactgtcagagaccagactataacaccccaaaatacgactcagagaccagactatatcaccccaaaatacgactgtcagagaccagattataccaccccaaaatatgactgccagagaccagactatatcaccccaaaatatgactgtcagagaccagactataccaccccaaaatacgactgtcagagaccagactataccaccccaaaatatgactcagagaccagactatatcaccccaaaatatgactgtcagagactaaccagaccatgcctcccacacatgcctctttgtcttaaggatcatttggagctggttattttgagaaactgcagatgcaggagaacctttaaaaacagaaacttaccattttgtaaaggaaatgtccgtcaataaaggaactgtccatttgtaagggtgccttcctctctgcaccagagagagaagaacgactagatctctagactcctgaaccatggagaaggtttctaagcctgaagtttaaactacctgtttgagatcaactccagagacatactcagttctctgggtgcctcccaagtgcacacgagctacacatactaataaacttctgtttgtttttctcttcttactcggtctttgttacagggagtctcagctaagaaggttggagggcagagagaaaactcgtgttctgcccctaccggagcaagtgtgtgttcctctgcactgatgaatgtgcctgtctccagaaagggcagcccgtaggtactgagagcagaggtggagcttctaagagagcagtgacagcctcactcctcctccctggcccaccctcaccccgtcccctgcacctggagccactggaagacggaggagccatcctttaagaatctcctggaggactcatcgaccccacggggacatggtacaaggctggagagcagctctgtgttgaaggggaggagagaagataatctcatttcctcccagtctaaagaatgagcattcccagtggaaggagaaagcagatccttggccacacacaatcctcggagaagagtcaacaggattgtgactagaagtggcttctacatcagcccaaagttgactttcagcaaaaggtaggtttttgcaatttaaagcagtgacaattgatttagacaaggttagccttaagtgatttaaaaaatgcttttatgtaagatctcatttaatcttcattgcggttcttgtagaaaggaatcagaatttaaggcaccagcgcgaggttggagagctattatattatggagctaggattctgacctagttggcttaacaaggaggggcttaataaagacaagtgatctccaagcccaaatacaagcaaagccagctcataaaagatctgctttcagattttaatccttgatgaagggaaatgtttaaaaatttcctaaaagcaaaattgacaagacaaatccaaagaaaaccctgtcttatccagtgtggcctcaaggcccaaccgcatcccctgaacagaaaaccctgtcttacccagtgtggccttgaggtccaaccgcatcccctgaacctggtacattcgcctttgggtacgttcagtaaagaagccagggtctcagaatatatggagtggtatttttgttgggagcaggggtggagaagttgccttgaaatatatacagattaaaaatgtatatatttcaaatgtatttaacaaaatttatagctaagcaaatattccctacgatctaccaaaaaaatgtagaaattatccacaaagaatttagggcttcatctatttttagaggaagaagctgttagcatgctgtgttcagaataaatacattcaattaagttaataaattaatcatgtaatctttgattaagattatcaccaatgaaatatagctacacaaacagtaatgattcaactatagctttgcttattgcaatgaaaaggatgatctggacatctagataccctcccgaaaaccttgtgaaacctgtgactacctcttcatgtaagtccctctccccacccccgactggggaagtcaatgatttaccaaacacagcacacagctggtccatggcaaaggcagcaggaacccagcactatctgcctaaagatggtgacctgcttatgggtggccgtggtccgcaagtcattagtagctttggcacacgggtctatcttctggaatgaccaggcctccctacgtaggccagagtcttcctgcacaggccctgggccctaaggctgcacaggtgcccgaggtccagtcagcagatatgttgggatcaaggcatcgcgtgtccttctgctaaggcagtgtttcccataccactggcaggcatcaagatcacttagagagcttgtaattcctcaggaaatgaccttcaggcctctcacaaaaagtgtcaaagaactgaaactagatcaccacaccagatgcctgacccctcattcaccatgatcgcttccttgccccaggctggagtgcagtggtgcgatctcagctcactgcgacctctgcctcccgggttcaagtgatgcttctgtctcagcctcgtgagtagctgggactacaggtgcacgccaccacgcccagctaatttttgtatttttagtagagacgggatttcttagccagactggtctcaaactcctgaccttgttatctgcccacctctgcctcccaaaatgctgagattacaggtgtaagccaccgcaaccagcctgagccaccgcgcctggccctgttttcttatacattgttatatttcttgcctgctatataaactcctggttttgatcagtcagggagatggatttgagactcagctgcagcaccctattaaagccttcttccttggcaatactcatcatctcagcgattggctttctgtgcggtgagcagcaggactgagatcaaacccctggtgtttcagtaaccattttcctactgtttttcttttctttttttttttctgtagagccaatgtcgtgccatgttgcccaggctggtttcaaactcctgggatcaggtgatccccctacctcagcctcccaaagtgctgggattacaggtatgaaccaccacgcctggccccctagtgaaatctaaaattgcaacgctcttttttctcacagttttctcatgtcattaattctctcttctacttctctaaaaactttaatctactccactgtccctgacattttagtttttgtctgactacactgtcttgcctaccccatatttgaaccactttttcactactgcccccagcccctattgccctaacaggcctcccaggcttctcagacccgcgcaatggagatgaagcctggagttactgactgtgctgcgcaaagcaggccaggagcccacagctgtcctgaaagcccttctgtttgtggtgttcaccttggacaggccttcgcccccgacttcgttcatctgttcttgctcagcttatatcttctcttaacccaccgcaacattcatggctgagaccccctaacaaaagactgattagcaaaagaaaatcatgcaaatttatctaacgaaagttttacatgacccaggagccttcagacatgaaggcccaaagaaacagggaacactgtatttttatgcttaggatggataaagagtggacagtcctgtaggatggttggacaaagggaagatgagctaatgagaataacctggggagaacttagcaaggccaatttgttcagattccgcttggcatcgctgggtcttcattcctcttctctaggtacagggaggaggaacctctggaatgagcgtctaatgacctactttagagggaggccaaataattattttaggacctgctttggaggagaacactgggagaaggtcagagagatcttcccgctgctgccctgcgttctccttcccctcctttgtctccacggtccccgcccttgtttaccctcccgtgctcttaccaccctccaggatcatactcaatgcattaaccctttccctcgtctcttctggcttgttcgccccaggcctccccataaacctttcttaataaatccttctttctccatcctgtgtctacgtctacttccaaccattttttctccttaaatatttaattcaccatctttacctacatgcttattttatgcattatcacaaaattatattttcagcccccatattttcctgaagctcttttgcaactgttgtaaataatcttctggcagccaaacccctttttcgttccctcattaaggagggtttatacttaggaagcagccaccacttccaccactgagctggcattggcgatacgacaatgaacaagatacaaatggcctttacccttatggagcacgcagtccgtggtaaagaaagcaagaagataatcaattacagaccaacctggataacacagggagatctcatcgctgcaaaataaaaaaaattagccaggcgtggtggcgcatgcctgtggtccagctatttgggaggcttaaacaggaggatcatttgagctggggagtttgaggttgcagtgagccatgatcacgctactgcactccagcctgggcgacagagtgagacctgcagtgagccatgatcacgctactgcactccagcctgggcgacagagtgagaccttgtctataaaatgataataataagaataaccaattgaattacagcataacaaatgccaggatggagaaataatgggaaactgggtgcagaggagggaggtctttaaggcagatcaactctccttggcatttagttctaaatactgtcctcccatgtggcttgtaggacccacactcccctgagactcctcctgccactcctacttggttttattctttgtcactcctccatttccccaactatctttgaaatattcgtgttccacaggactttgtcatttacacactcttcccttctctttctagaggcttccttgagcatgctcactgcttgaaaacctgatgaaactgacatccgtctctagcctggagacgttctcttgcacactcagctctatgacgggctcctcaaactcaaaaggctcgggaactgagctcattatgtttcctcccagtccttctcctattatctgtcctactctagttaatgaaattttcacctccctatttggagcaagtccaaaaactgagagtcaacctatatttctccattttacttattctctgccttcactggaggctgtaccacttacaagcacatactctaaagccagatggtgtggactgaatcacaattctactatttgctagaagagtgccttaggtaaattactgcatagctctgtgactccatttcctcatctgggaagtgtattattaagaatgtggctggcctttgtccccaggttttgggaagtaacctctaaacccctgccatttcccgtgctctaggggtatctttgttattcacagggggctccttggaccacacttggtagtctatgtgaacatatgacttggaatggaggctggtcaagacggaaagacccaccatgtgattagggagtcgagggctttgaaccatattttagtggcctgactctgaggaggagaggggccaaagactgagacacatgggcaatgattcgatgaatcatgcctatgtaatgaaaccccaataaaactcacaaggactcaggggagcttccctggttggcaatttcctctgtgcgttgccatacactgaagtgccggaagggtagcacgtcctgaggacaagggcagcttcgcagctagaaccctcatagatccccttctgtgcatctctccctttcactgcttctgaattacatccttttactgcaataaaactgccatcataagtatagtgccttcctgagttctgtgagctgttctagaaaattgttgaacctcagggagtctgtagggacccctgaattggtagccagctggttagaagttagggtggctccggaggcctccaaacttgcagctggtgtctgccgtgaaggaagtcttgtaaagaactgtgcccttaacctgcggtttggcctaaatccagacagggaattgaagacaataacgcctaatccatatggttactgtgagaattaaatgagctaatacagataaagcctttgaatagtaactatcataagtacaaaatgaatatcacctatttttatttgtattgatttatttttatagacagggtcttgctctgttgcccaggctggaatgcagtggcaccatcgatcattgctcattgcagcctcaacctcctgggctcaagtgatcctcccacttcagcctcccaagtagctaggactacaggtgcacaccatcatgcccaactaacctgtttaattttgtagagacgaggtctcactctgttgcaggctggcctcaagctcctgacgtcaaacaatcctcttcagcttcccaaagtgctggggttgatgttacccacctttagaattgttgccttgcattagtgtgaacagagcccatatacatgaggagtctgcattcccagggtcttcccaatgggcctccactggatgcccatagagaagaatggtacacagcagaaaagcagagagagagagcttcatgtggcagcacacagacatagatccccacctcctttctgggcctttccttcacacaacacaaaagcatgaggccactgtggatgggcaggtaatccttttgtcccccaaggcttgtggaaagatcttctgttgtttgtttgtttgttagtggtagggtggttaaaagcaaaagccatctgcccctggatcatgccccatataaaaccgaggtctgctaccagtgagccaggagcaggaagctttctccaaagaaccccacagatacaagcagagtttgactatgagacaaaggcagaaatactgagaaaaccccatacatgaggtccaggctaacagggatagcctaagattgaggctggaccaggagaattaaaaaatgccccttccacaccttaagtctttcatgggaaaataagcaacaacagttgtttactcttgggagggaggaatcaaatgaaaagagagacatcttttgtgtacaggcattcagggtctaccaaaagatgaaggtgaaacagtaacattgacaaaaactctccagcacaccaggtccttcactaatacaaggtatcagagcccacgactggaagaacttaaagtttgaactaactgtgattatagcagcaacaaaacccaaacccaactcaaaccagacttccacacaagtggcctggcagaagaagtatgcccatttctggacataaaatattttaaaagtccctttattactattgttcttctacacacaatgtctgatggtcaatttttagaaatacatatacgtatgatgtgtaaagcaagaaaacatccaacttactatcaagggataaagcaatcaacagaataaggcccagagatgaacaagatgctaaaacaatcaaacaggaattttaaaataaccatgattagcacaggacaaaaagatcaactctcatcacttctatgtaaaatgtatttaaaatcttaaacagtgaaataaggcaagagccagaaaaaaaaaggcacacagacttaaaaaaacaaaactacattcattacctgactgcataaaaattccaaataatcttttttaaatgctattggagtaagtgaatctaacaaggttgtggaagttaaggccaatatataaaaatcaaatgtctttttatatactagcaatgaacaattggaaattcaaattttaggaaacatcatttaccctagtatcaaaagcatgaaatatttggagataaatctaacaaaaatgtgtaagaaatactgtgaaaattacagaatattgatgatggaaattaaagcacacataaaaaataaagcaaactaccatgtcatgaataggaagactcagtatggttaaacttttaattcttcccaaagtgagctataggttcaatggaaatccaatgaaaatccaagtaaggctttttttggtagaaaatagcaaaggtgattccaaagtctacacggactttacctgcactatatccaaaatttagttcaaaatagacgccaggcataatatcacacctaaaactataaaatcttctagaatgaaaaaagaaaaatctttgttaagcaaaacgaggtgtaaaatgatgtaataatttgggggagcaaaataagcagtttattattaggttaaaaatactcttaccacacaagccagatagatactccttttctaagtatttcccccccccaacccaaaatgaaaacatatccataaaactaaactgcaaatgaatgacacaagatttacctgcacagtgtcatggcactatggggctggcaaggtagtagcatagccatggtgccaaggcaaacttctcaaatctctctgtgcttcagtccctagaaggaactcagctacaggcgatgcccgatcaggttgaggtttggaatgggccctggatactggcatttttaaaactcttcccaggtggccgggcatggtggctcttgtaatcccagcactttgggaggctgaaatgggaggatggctggaggccaggagtttgagaacagcctgagcaacatagcaagatctcgtctcaataaataaataaatattcttccaaggcaattttgctgtgctgctgggtttaaagcactagcaggacaagacagtcattgtttctagtatatatgtgaacacattgcaggagggaataacatatacaaattagcgcttaaaaacattcaggaaggaacatacaaaggagcaaagaattatatattcaacacatgttttgtgctctagaagaaattaaacagaacatggaatcaaacaaaaattaaagataaaataggtcaaaagagaaattggagagaaaataaagcaaaggaaggacaaaacaccattagaaacacccaggaacagaatgatcagctgccagcaagtcagtgtcagcaagggaagatctgaaatgctagcaaagaggaagaagaaaaagattaaagacattgaaaggaaaagatatggaggacagacaagatacaaaataaagcaaaacataacattgctctcaaatttgaaacacgtgacaggaaagtgttaatttagagaggtaaaattcaacagaaaattaaaaggcatgaaaatggctaattaatatgtggaaggattctgtgtaaatttagaaaaatgaaaacaatgtattcagttggtgcaaaagtaattgtggtttttgccgttaaaacctctttgcagatcacatcatcgaaaactgaaaagattgatgtgtgggcaaaggtgtaaaactagaaacttgaatataatgttgaataaaactatcattttcaattcaaataccactttacttcagcacatttatcttacatatacactcgcaactaggaaaggaatatggacaagcaaagtcactgtgtcatttttagtcattgtaaaaaccagaaaaaatctaaagttttgtttgtaaaggattggtttaaaatcatggaatatccatacaatgaaaaaggtaggtgttcactgggaaatacagtagctgtctatgttgatagggaaagaccttcaagattgctcaagtgacacaacggatatctaacaatacgtatgaatgcataccctcctgttagggaaacaggagcctaggagagtcagggtgacaccactttaaaatcaactccatcttaaacctaatgaggcacattccttgccagttaccacctgtattagcctcttctcatgctgttaataaagacatattctagactggataattcataaaagaaagaggtttaattgactcccagttccgcagggatggggagggctcagaaaatgtagaatcatggcagaaggggaagcaaacacgtccttctgcacatggtggcagcaaggagaagtacagcaaggagaagtgtgaagtgggggaaaaccccttataaagccatcagatctcgtgagaactcacgcattatcacaaggatagcatggaggttaccgcccccacgattcgattacctcccactgggtctctcccatgacacgtggtgattatgggaactacagttcaagatgagatttgggtgggggatacatgggtgggacacagccaaaccatgtcaccacccatggtcatagaatgttaatagctgagaaaaacgcctaatgcctgcaaggacaaactcttatgacagcaaaatgtcccaatgtcccaatatcacatagcaatatatgcttttaaagataattatagtcatgctgtggtgtgtttgtgcactaaagtgccaaggacagctttctttaaaccaacgaggaataaattttgtcacaccgtcagcccactggcgtgtagacataatgtagcttagcttttacatagataagacccctatataagaaaaacttaagacaaagatgaggggttcctcctcttgctttctgaggatgccctactttgtatctgggtaggtttcagtaaactctctctcctcactgcactctgcaactcaccttgaattctttcctgcacaagatccaagaactcttacttggggtctggattggaacaccttttcctggcaacactcctattacacttgaaatttcaatcgtatgcctgtatttcttctgtttcaaatgttaaaaatttatatgttttccgtgaaaaaagagttggaattttttttaagttttagctttttatggagaaaaattattaactagaaaattagactatcagagagacttatagtttcacctcgctaagatttcattctcaaacatgggccattacttttactggaagtaaaaaattatataattatattggaactagtgttgaataattttatttttgttcacataaagcaacatgaataaaatacacaataactataacttaaatctgaaataagcactaaaattatgtgcacagcattcattttgctattctgctgcaaacagaatattttcttttcatagcacctgcagtgaaggtctcaaaggagtcttgcatggaagggcattgaaggggacatgaaattttaactaataccacgagctcacatgcttcaaacccaaacttgcttataaccaaccaatgtcacttcttagagaacaatattacaggtttttagtattgtgctattgtttttccttaaattatgttttgttatctgaaatcccaattaatggttttagtttttttttaatttttgtaagacagggtcttgaactcctgggctcaagtgatcctcccgcctcagcctcccaaagtgctgggattaccggtgtgagccgccgcacctggctaatgtttgctctggacaccataagacttgttagcataatcgtaaggagaccctgaaaatacatattttagctgctcccagagtctctctgtgtttctacaggacagtgggaaactgatgtaaataattaagaagcaaattaattatttgtcagttacgtacccatcctgacttccagcatggagacttaaatgaaaagcagaggcagccaggtgccaattacttttacaagcttcattcttaagttgaattaggaaagactaagatgtaaccagatgtatgtattatcaagtgatgaaagttatctgctttttaaaacactttttgatttagtcctcctaattttcctatgattgcaactcccaaaaagaatcataacataaaacctacacctaagaaaattctgttctgatgcaggggaaattcatctacttgcaaaagcacactgcaggattgcaattcagatgtcaagttaacctgatgagtgatttgaacacacacacacacacacacacacacacacacacacacacttgctttgtaaattaaaaatctggagcaagccacagaacatggtccctttcagaagggagtgtctttgttctgcatagctcctgtcctgatggtgtgggcacctctgagtggtctctccattgtgctggacctggttgctgtaactaacaatgggtggctctcctggtctgaaatctaaagagcatgttagtcacctgcaagcctgctcttatttaaaagagctggttcacctccttttttacatcgtcaaattagatcccctcagagaaatgccagaatgttcagttgacacattaacgctgaattaaaactagctacaatttccaacttgcagatggtggtgagaccaaaggtaataacaatgaatttgtcattcagccacaagggattgatgcagccaattaaggctactctctgcccatgagattctgctcaggttttctactccatcgtgactaggggagatcaccggaagggatgatttcttccacttacatcacacagaactcctgcaaaggggttttcactccacaaacacttgtgatggctcttattatgttccagacactgcttgaagccctctacaactattaactcatctaatcctcccaacaacgcttaatggtgagttctattactccgatcacttaagaggaaacctggatgctaagtaacttgtccaaggtcacacagctagtgaatggcacagctgggatgtgaacacaagcgctgtgacttcagaatccaggctcgccctgactttgctacaccactcctgtgcccgagataaagctgggtttccaatctccgcatcgttcacatttagggccaagtaattatttgttgttggaggctattctatacattgtagtgtccctggcctctacccactgggtccctggagtaaccctccctcccctgagctgtgaaaaccaaaaatgtcttcagatactgccaaatatctctttggggacaaaatcatctcgttgagatatcattctctatgtctatcatagaaatagaatgactaaaaagaagaaataatagaaaaatgtggcattactaaaaacaatcgtagtatgtccgtctctgtacattttgagatagaattattaggaaatatctcaaaacagtcctctctttttttgagacggagtctctctctgctgcccagactggagtgcaatggcaccatctcgcctcaccgcaacctccccctcctgggttcaagcgattctcgtgcctcagcctcccgagtcgctggtattacaggcacccaccaccacgcccggctaattttttgtattttttagtagagatggggtttcgccaagttggccaggctggtcttgaactcctgacctcaggtgatccacctgccttggcctcccaaagtgctgggattacaggcgtgagccactgcgcccaggctcaaaatagtccttcttttagcttttatgttatctctccttcctagcttttttttttttttttttttttttttttggcttaggcagctaggaagcccagagctctatcttcacctgaagccacgagcatttgaggaattatgtgctcaatattgttagatgccgcatatgcacagaaatagaggaagttacacgggtttcagcctcgttgaagaaaagcatcgacagggaaattagaatcagtcaagcagccagaacatatgtaaatgttaccttatgcggcctgtgggaatgaagcacaacaggacacgtgggcgcggtagtgagcagggccggctctactgaggaggtcggtgagcagagtccgcagcggaaaaggcgaaggcgacgtgacgtccagcaagctcgccatgttgagaaggtaacacggcgaagccccgcccagctgggatggaaggcgccgttggaaggaacgtgaggcacagttggaagcaggcaacggtgggcgttgcaggctcgtgaacaagaacaggaagcgtgctcgcttcggcagcgcatggactaacattggaacggtacagggaagatcagcagggcccctgtgccaggacggcacgcgaattcctgaagtgttccaaataaataaatgagtaagaacaggaagtggtactgggcgtttcaggaataataacgagcagcggggaaccagggctctgcggggctcatggcgagttatggaagctgttacgaatctgccttatggtgaggaagacagagatcgaggtgttggcagtgaaatggaaagtaaggggtgattaagggaaaatatttgaaattgaagaattgacagggatccatggtttgttagacattgaaaataataacaaatgtggtaggctgcttctcagtgagctcccactatcccctttctcctgggagccacactgcagtggaagctcttcccccagtgtgggctagacctagtgactcatttctaatgaacagaatatggcagagtaaggggtcactcttacaaaagaatgtggcttccatcttgggtgtgagtggcctccggggagacccgcataacaatgaaatgatgtccctggaccagccagagaggaccagaggactgtcagcagtcccatgagcgagcctggatgtgaatgcgtcccctgatccccgacgttcagctgtgagatggccgcagcactggccacagccttgactgcagccttgtagagaacctgggccagaggatgctgctaagccacgcctggactcctgagccacagggactgtgaatggatcaaagtgtgctgtttgaagccactaaatccagggggcattagttacacagcaatggagaaaaagtacaacaagcttacaagacaaaaaataacttttatctcaaacataggacaccagtttattcagtttacatatttggagatatggtttttctgaaaattaaccaaagggggaatgaataaagaaaaagaaacatcaaggcaaggaaaggaagagagcccacatctaatagaggaaatgtcgttgcccttttagtacagaagacagagatctctcttccatgggtaatggctctcctgtgttagccatctacttgctgtccccagcattatgcagcgacatataactggactatgttcagaaaattaaaatgacatattcaaggtaaatatctaggaacatttcagcccttaggaagtagaagaaatacctcctgttacaatctccatattttctaatagataatgcaactcattctgctacacatcagctagttaactagcaacactttttccagtgctgaccagtgcaggagttctttgaaagaattacttgtttcaaagaggtcgaagtgcagagtacaatggtgattgccaggagttggaggcatggggcatggggagaggttggtcaaagggaggatagtctcagtcagataagatgagtgtgttctgaagatctatgtatgagacggtgctgtcaataataatgtattattgtatacttgaaattgttaagagacaaatgttctcaccacaagaaaaaccaataactatgtaggtgatggatgttaattactttgactgtggtaaccgtttcacagtgcgtgcatatatcaaaacttcccattgtgcgctgtaaatatacacaatctttatatctcgataaagctaggatgggagaaggaaacacttataaatcacagcacacttgaaggaaagaggaacagacacctatttcaacatgtaagatcacaacagaaagaagaatgtgagttccatgaaggcaggcatttgccttgttctcgtcatagtcccaggccctggcgcgtgttagatggtccctagtgatgaggtgagtataattaataatggagactaatacccagggtccttaactatatgcacaaagcaaacacactttatcctctatgtaattctatattaattagcactcttagtttataagcttactaaccatgtcttgatgagtgattctgttatccaaactttcaagcccattgccagaaaccaaagctattggtcagtgtgttagtggtctccagggaaacaggagcaatgggatgcacgtggtgggtaatttcacatgtcagcttggctgcaccaggatgctcagatatttggtcaaatgttattctggatattcctgtgagggtgtttttggatgagactgacgtttcaatgggtgaacattgagtaaagcagacttccctccataatgttgggggggctcatctgagcagctgaaggcctgaatgaaacaaaggctgatatcccccaaacaagacgtgcttccgtagcagatggctgccagcgttaactgcagcagtgcctcttggtctccagcctgctggcccattctagatgctggacttgctagcctccacagtcttgtgagcaaattcctcaaaatagatctctctctctctctgtacattgtattgcttctgtttctctggagagccttaacacaatgtgtgtgtgtgtgtgtgtgtgtgtgtgcacatgcacatatagagagttttttgaaataatttttaattattttttaatacttttattttagagatggggtctcactgtgttgcccagacgggtctcagatgggctcaagcaatcctcccaccatggcttcccaaagtgctgggattacaggcatgagccactgtgcccagcctaaagagatgtattttaagggaagatctggttctgcagttcaagtctgaaggccacctgctgacagaatccccttttctcagagggcggtcgattttctcttaagcccttcttcaactgactggatgaaggctgcccacataatggaggggaattggcttcctcaaagcctactgatttaaatgttagtctcattttaaatatatccttacagaaacatctggaataacgtctgaccaaatatctgggtacagtgatccagccaagttgagacatgaaattaatcaccatggcctacatttttatctgtttggctgcaattctgtcaaaggcttctgctcttcataacatttcactcactagctccatgaagccatatgatacaaaccttgcctgtgtagccttcacttttttccaaaagaagtctattaaatgccaatcaagtatcttctcctccaagctcagtagctcgggccttcaacagctgttccccattccgatccatctccctgagctaccctggcattcttatcaggacactggaggaatctatgtatgtgcctctaaagattcagcacccaaacatgatagaaatcactgtgttcacactgtatctctatatctgcccatccctttaaatcagtccaataaaccagattagaatcagtaataggactcagctgctttctttataccgttgatggttctggtttaaggaccatcaatggtataaagaaggcagctgagtcctattactcagctgctgtgtataaagaagggagaatggtttgaggatgctagacatccagctgacatccagctaacatcctcaaaccattttcctttaacttctaaccaaaatgccaagaaaatcaggggggcaaggttaacattaacaacatacgacagaccacctagtgtcagactgtgcatggtgttcgcgataataataacaaagatgaagcttgcctgagaaaaatcttggccagaattcagcacatcctacctaaggacagtccatcagaaacagaccacttggaaaagctgaaagtgtttgttttctgaaaccgaagtacctgtagcaaccggcccaaggttctggagaacagaattaataaaaggaatcaaacttatgctattttagaaggtttctttaagaaccccatagtgtggccgggcacagtggctcatgcctgtaatcccagcattttgggaagcgaaggcgggcggatcacgaggtcaggagtttgagaccagcctggccaatatggtgaaatcccgtctctactaaaactacaaaaattagctgggcatggtggtgtgtgcctgtagtcccagttacttgggaggctgaggcaggagaactgcttgaacccgggaggtggagattgcagtgagccgagatcacgccgctgcactccagcctgggagacagagggagactctgtccccaccccccgaagaaaagaaccccatagtgcaattatatgtatccaggacccaacccagaaatgagaggaggaggtgcctgcccactgggagtgtcagcagagggctttgcttcattctactctccaagacccttacatctaacctgctccccctgacatccaggcctcttcatctgaggccaaatcactattgccatgcagcttaggcttgcatgcaataatgacttgcttatacatttttgtaaatgtgcacttaggtctaattaacgattttcctgtggacaggtgatagacctgtgcagattctttttttttttaagatggagtctcactctatcgcccaggctggagtgcagtggtgcgatcttggctcactgcaagctccgcctcccgggttcatgccattctcctgcctcagcctcccaagtagctgggactacaggcacccattaccacatccagctgattttttgtatttttagtagagacagggtttcaccatgttagccaggatggtctcgatctcctgacctcgtgatccgcccgcctcagcctcccaaagtgctgggattacaggcgtgagccccctcgcccggcccctgtgcagattcttttggtcatttttgtttggtccatggttcattctgtaacattctaaactcttgccaagctgcagtgagcaggttctctatttgccttctatctgctagtcatctttcagtgctgtctatctcttataggatggcacagaataacttccctcagccacagttgaagcacctctacacttatgcataaatcagctatatattagccaggtgtagtggtgtgtaccagtagttctagctatctggaaggctgagacaggaggattgcttcagcccaggaggtcaagtctgcaatgagctatgattatgccactgcattctagcctgggcaacagaatgagaccccatctcttaaaaaaaaaaaagtcagctgtatgtctgtatccccttcctcaatccatgcccctattattgccctttccacaccaattctattcctgccctccctccatcagcctcaaatttttagagcttgcacagaccaaatagtagagttatctctctctactgtattgctatgtgaaaatgacagacggtggtttctttctcccatttccagtcccatcttttcaacacctagacagcacctacaaatcctaggatagaaaagtggagagtaacctacatggaatccatggaaaagctagtatttcagaaaaaaataaatgggggatcatctaggaatctctaaaaaagagcatatctctgaaagttatctctgtcaagatccagaagaatatatcaacaatttcttggtatcctaaagatattttatcctctattaatgtattgggtatccattgctccataacaaattgctcccagcttcacggcttaaagcaacacccatctactcccttgcattttgcaagcatcaggaatcaggcttagctgggtcctctgcttcagctctcacaagacagcaatcatgatgtcagccggcggcattctcacttgaggcgcaaatggggaagcatttgctccgacactcaggttgttagtggcattcgttttcctgtggttgcagaatggaggtccctgtgttcatccaactgtgtgcctgaggccactttcagctcctagaggctgcctgtggctcttgaggacgcctacagttcctagatgctgcccacagctgttcgccacacagggcacctacttcatcaagccagcaagaagagtttctagagcgagtggactagccagccagagtcttctagaacatagcatatcatggagcaaaaccccagcccctttgccatactctgttggctatacaaaagacataggtcccacccacactcaaggagagggaatcatacaagaatgtgactatcagagtgtggggattgggactccaccctagagcaggccattaccatgaaagaagagaagaaaaatcataaggagagaagcaacttaaacgaaaacttgccagtattagattgaaaaaaggaattatgctgcaaaaaatcaaatcagtcatgtgaaaaataaaatttctgaagaatgcatatgaaatgactgaaaagatgaaaacaagtcagaaaatgacagatgatgtacagaaaagagagccaatgtttggaaaaaactggtgttccttcagaaagctgagaacaaatgtgacagaagcaataagcaaaaaagatgtatataatatgtatgaaattatatatggatgtaaatcaagatatctagatattagaagaacactttccacataggaagctacaccactatgcctcagttaaaatggtgcaccatatgcaaaggaaaaattgtgtaaagatagacatccatcctggaagagtctgaatgagaatgataaggattgcaccctgagaaagtaaggcagaaaacgagcagtttcttttagaggattaagctggcctcatattcctcctcctgtagcaataaatgccaaggcacagagaatcttttctatagacttttagagaggaaaagactcataggccatgaatttcataactaactgtcttctgtgcaaatgttggagacaaagttaaacaagaattatgaaacaatgcttacgtctcccttaaaaactgtcttgagaaccaaactgaacaattagcagcaggaaacatatgaaagaagaaaggcaatctgtggaatgaaaaatgtatacactaatatataattattgtaactagtactaaaagaaaaggtaaatattaaatctttaaagaaggcacacaatttttaaaataatttggacctaaaactacagattaaattacaaaacccaaaacatcatattcaagtattgacatattacaaacccataatattagccagtttgtgggtagcccaaaacacactggaatggaatagaaaaccatcaacagattcgtgtttccataagacaaaggaaccaagcatttatgtggagaaatctaagtaaacaggttaccaaaattgtctcaagtatagaaaacttcagtagatcaaaggccttgaaaaaattttaaaaatctccaggaagagatgagcaaattctaccaaaacctcatgggatagacatttttgttaagatacaattcacataacataacattcaccgtcttaaccatttgaaagtgtacaagtcagtgttctcacatatatccacaatgttctacaaccatcaccatcaatttcggaacattttcatcaccccagaaacaattaagcattaaacagtcactccccattccctgtcccactaatctattttctgtctctatgtgtttgcccattctgaacatttcacagaaatacaatcatatgcagctgacccttgaacaacacggggttagggaagccaacctttcgcacagttgaaaatcttcatataactttggactctccaaagacttaactactaatagcctactgttgactggaagccttacggataacataaacagttgattaacatgtatttggaatgttgtatatattagatactgtattataaaataaaccagagaaaagaaaatgctattaagaaactcatcaggaagagaaaatacatttaccattcataagtgaaagtgagtaggctgaggaggaggaggaagaggaggggctggtcttgctgtctcacgggtggcagaggcaggagagtagaggaggagaggcaggagaggcagcatactcagtgcaactcgtatagaaaaaaactccacttatcagtggacatgcacatttcaaacccttgaacaaccctgagttgttcaagactcagctgtaatatgtggtcttttgtgtctggcttctttcactgatcatatttagtatccatctgtaaattggcatgataaggcccaagaactatgggcaggcatcgatgtcctctgctacacctctggcatcacttcagtccattcacacaccctccagtatgtgaaccgctccagtaagttcattttgcctcatccttagtttttcaaagtgatttgttggaaggaagaaggaagggagggagggaggaaggaaggaaaggagggagggaggaagggagggagggaggagggagggagaaaggaaggaggagaaaggaaggagggagggagggaaggaaggagagaggagggaaagaaggagagagggaaggagagagggagggaaggaaggaaagagggagggagagagggagggaaggaaggaaagagggaaggagagagggagggaaggaagggaaggaaggaagaagggaaggaaggagggagggaaggagagaaggatggaaggaaggaagaaaggaagggagggtgggtgggtgggttagtgggactagctatagtccctactgtggcgattggtcttaaagccagaggtgatactcatcatttccgccctccaccactcatcctaaatcccctcacctttggtcagcattggtgctgatttacgttgcttacttggcagaaaaacccaatattcacccctgatgaccaggtccttgtgagactaaggttgctgcagttgcacatttatggttattaatgaacattcagcaataacaggttccctggtgaatatactaacttcccgatatactccttccagcccagttttgtaccggtgacttttttttccatatgataatcagagtcaataagaccctacatgtataggaagtcattttgttgcccaatggtctactggtatgaggagctccaaatgaccagagagcagccatagcttcaagtttggcagaacctctacctctttctggggcaagcatctccctcctgggctatagtgcagctgagcctgaagtttcagcatggggagcaccaattccctgagtcggtctctggatctaaccatgagaaggaacatccctgcttccactgctgggtcctgtgccttgcctgctacctactgaacatccaaccccaaatcctgactattggttctatgtacagtccccacctcgaaggtcagagtcccagctccactggatatcattccaagcctgtgtatcagcagcacttttaagaggctgtattagtgtgttagggctgttataacaaaataccacagactggatggcttaaacaatggaagttaattttctcagcatatggaggctggagtccaacctcagggtgtcagcagggttcgtttcttctggcgcctctctccttggcttgcaggtggctgccttctcactgtgtcctcacatggtcaccttccatctaggagtgttatctgtaccctaatttcctccttataagaacaccaatcatttgggattagggcccaaatgacctcattttaccttaattacctctttaaaggccctatctccaaatatagtcacattttgagttactggagattaggacttaacatattactcttggaaggacacaattcacccatagcagaggtcattccaacattctgtcttggcagcagggtccgggtgatgtgacaatgttattccccctgtcacacatccttgggcataaggagaattccttgatgcaaagagatctcactcagtgtcccatgatgataactctggcactcgatgaaaactgggtagtgctggcaaaggcaccacagtagggaaggcatgtctggaatacatgtcaataccccctctcagttaaaagtgtccaatgtaatcagctcgacacggcatggtggtttggtctccttgggggctggtacacagtgaagattcagtatccatctctgctgctgacgacgcaagcattctgcagtggcagtcgctagatcagcctggagggcagggaacccatgctgtaaggcccacgcagagaccctcttcccaccgctacagatactcacgccatacgctcccccacacagagaccctcttcccaccgctacagatactcatgccatacgctcccccacacagagaccctcttcccaccgctacagatactcacgccatacgctccctgtgcaaccacgagggtcggctggaggagaagcaggatgcctcctctgaacaagtcatccaatccaccagatggtttgggtcttccttgctttttgtgttcctactctcatgggtccaaccatatgtctgcttcctggacatccttgccttttttttccaattttaattcttccaggcccttaactaaccagctaaactatttgaaattgcccaataccctgtttatccttgtttcaggccccttttcctttcccatgatgttggcgatcaggggcactgtttgaattctgcttaccaggagcgtttctcttcaccgttgcccttcagtgtgccctgagtggggctgtgacgcagcagtaatctgctcctgccagcttccttcttccaaacatctaggaaccacgcccaagttttcacctccttgttcatacaacatgggtgaaagaaacaagacacaaaagggtgcgtactgcatggctccgtgtcaatctagccaataacaggtgaaaccaatccctgctgatggaagtaacgagactgattacatgtgtgggaaatggtagggatgactgcagagacacaagaaggcttctggatgttaaggaatgttctatttcttgatgtgcatgccaattacacagcagggtcactctgggaaagtcaccaaacactacacttatgagtggtacatgttcctatatgattgttaaactttaataaattttacaaaaccaagcaaacaaaaacaaccacagagttcagtcagcttactggatgcaaaattaacatacagagatcaattttaatttcctgatgaggccaacagtaaaaaaattaaatgttaaatagacacactcaagagcagcaaaaacaaaggcatgtaattagaaataatctaatagaagatagggaggaaattatactttattgagtgacattaaagaaaagttcataaatcaagagacatgcttcttcatggacttagagactcaatattgcaaagatgcaaattgtgtacagattcaattaaaatttaattaaaattgttacagttttttgaggggggaggggacttgacaagtttattctatgcaaagaaccaagacttaccaagacactcttgaaggtagagaaattatttcttgcagccatcaagacttattaactacaagaattaagatagagtggaattagcacaagactaaaacagaattgaaatcccagtcacagcctcacacttgacatcagaacatctgatctgtgataaggtggtgctgggaaaaagggggaaggacagtcctgtgaataattggcactatgacgggtaggtatccataccaaaaaagacagtgggtctttatacaaaaagcaacctcagaattacatacataaatgcaacaggcaaataataaagctgttacatgaaaataacataggaaattataatcttattgtagggaaattttttttctttaacaaggtaccaaagtcactaaccataaagaaaaaaattaacatgtttgaccatattaaattgagaacatctgttcacagcataaagagagtacaaagataaggaacagacccatcacagtaggtcatatctataacctttgggaggccaaggcaggaggatcacttgcacccaagagtttgagactggcctgggcaagacggcaagaccccatctcttaaaaaataaaaataacataaataaaataaagacaaggcacaaaatagagaagctatttgcaacaaatacaactgacaaatgactcatgtagaaacaactgcaacaaatcaatgagaaaaggcaagtgacccattagaaaaatgggacaaacccctgggcaggcatttcacaaatgaggaaatcccaattaccggtaaatatttgaaaagcatactgttaatcggactagacgagcaagaagtggcaagtacattggatgatttgatcgtacacatgcatgccagagcaccaggtcagtgaagatttcagcggtccagcggcctgagacacgctgggccatctgtgccacagaggacacatttatatcttgcaactctcccctctaggaaggaaacacaattcctggcagatctcttcagattctggaggcagcttaccttatactaatgctactctaactcatacattcgttgattaaaaaccaaccaaccaacctgccacctttgtgtggtttctagagcagaaatgggctggtggcagctgcagactttagtgtaagtggttctgcttccagggccatacaaccccgcttgcaccactatggcaatatctctggtgtgatgggaagtatgtagagtttatggcaagtcccagtaggagaatcacacatagaccccaagggtttagggcacacccatgctgtctgcagtgtagagctatatgcttttttcaaaagaactcctaacatgttagtggcccctgacaaacacggagaactggccatgagacaatgacagtgctcccagaattgcttgtagaagctggctcctgccagattcactgagtcataggtcaggtgggcctaggagcattccaccacgacatggaagtgatacctccaggatcgggcatcaacaggtcacaaggcacaaggaaactctcagagcagatagcccagagctctgtgttattcatgactgttgcaatcagggtgccaccctttcagctcacacctatggctgcttgaggccaccagctcatggaggagaacaaagactgatcttggttcatacatgattggcttgatatgtgggtgcaagcagaaaatggattgcagctgccctacagcccgcccatcacaggtagtcccgaacagtaactgatccaggttgtcagtattaggaggtttattgaaggaaatgacagacagaagtgtaatcttgggtggccacaagacaggtacatcttcacacctcaaccccccagatccaggacttatatcttggggaaaactgtatgcgccatagaaggaatatgtaggtggctatggcatcatgacacttacaacgaagaggtgttcctacctaaagagtcacacgttgactagacattctggaggcattcccagactcagggttagtcacgtggattaccatttaaaataaagtcattcttgtccccactgtagcaataaagagaaatcttcccaatatgagtcatccactttgtgtggatagagaagggactggaatttggaatatacgtaggctcatgggctatctgtgtggcaaatggtttggttggttgattgggctggaagaaaataagcaccagactgagaataaggagatctgggaaagagacaaatggatggccctcagagtgggcacaaagtgtgcagatctttgcaccacatattaatcaccagcagagagccaacctgggaagaggttccaaactaccaatgagaatcacttggccggttgacaccagccagcctctgccatctgctattcatgttcaggagtaacaggcacatgaatgggcagccgtggtggcaaggtgggaggctatgcctggacctgctggcatgagctcccgtgcaccaaggctaatctagctactgctgctgctgaacatccagcctgctttcaagagagacagatactgagaccctgatatggcgccatcccttgaggactctaacctgccacttgatggtcttttgagcttggaaggcacaattcatcttgactaaaattggtacatgctcaagatacaccctttcttgcctaagggcaattagctggcactaacatctgaggactttccggaatgcttgatcccactgacacagggtctggaataatattgccccactttacagcaaaaaaccatactttacagtaaaaaggtgccagtatatgaccatgaaatccactggtcctgttgcatacctgccacccagaaacccctagcctgagagagtaatggaatggcttattgaagacgccactgattcaccagtgtggagatcggtgacctgaatggatacggtatcattccctgagacacggtatcctcttaaacaattgattatttattagatttgggttagtaaattacatacatgggtccagaaaccaaagggtggaagtagaatgacaacacttaccattatgtctgaaaacttgaggaatacgtagtttctgtacctgcaactctaggatctgcagatgtactagttcccaaatgggaaacttctgccagaggacacagacagggtcccacctgtgtccctttagactccggggtcaagagcccaccaagaaaatacaaatgctgtatgattccacttacataaaatacgtagagtagtcaaactcacagagatggaaagcaggatggagatttccaagggttgtggggtgccaggaaggggtggtaagtgtttaatgggtacagagtttcagctggggaagacaaaaatgttctggagatggatggtggtgatggtcccacaatactggaatgttcttaatgctacagagctgtgccttataaatggttaaaatggtcaatcctaggttgtgtttaccttaccgcaataatacaactatacatacacatgcagacatacatctagatgagacgaccagggaaggagaggggtttgcaggggcaattgtttctgatcaacaggtagacatagggccactgttacactgcaggcaggtaaaatagagttgacacagagatgatccacctgggcatatttttatacatcctcgttcaatttttacagtaaatgaacaagtgcagcagctatggttcaagaaggccatggtgaccagaggctcagacccttcagggaggaggctcagggtcaccttatcaggtaattactgcaacaaaaagaagtgccagctgagggtaaggagggtctgaaatggctcttggaagagggagttggtgaattattgcctgaaaaccagctccagtggttgtcaatgcatttcatcccgctatcctggagttctcctcagaaaggaagcccagcagaattctgtaggagctgcttccagagcctgtcggtggcagacagatctgcatggagcaaggggtggactgcagggggtattgtgttacgctctggagagaggccctcctctaagaccaaggcactcaccccctagcttctgggagtatccacagctcacacttcctagctgagtccttttctaggccatgccctagcttaaggagagctgcaccacctgagatcatgccttcttcccgagagagcaccccatgtcccatgactgctgggttataaaggcctggaccccttggcacaatttgagacaactctaaatatctgtttctgctccagaactccctgtggggtcaatgaaggcctttgtgtgatgtcattgcaactgaattcaatgcacagtcccctgatgtgtttagcctgagcacacttctaggaagatttcttgcacactagactttctctcttggggaactcaatctgcagcatagatcgcgctgcagtgtagctccaaggtgctgtttcctgactccttcatctgtgcgagaatctttgaattcgtgtataattttggctgtgggtttgtcatagacggcttttattaccttaaaatatgtcccctctatgttgattttgctgagggttttaatcataaagagatgctcgattttgtcaaatgcttattctgcatctactgagatgatcatgtgatttttgtttttaattctattatatggtgtatcacatttattgacttacgctgtgttaagccatccctgcatccctggcatgaaacctatttgatcatggtgggttgtctttttgatatgccattggattcgatttactagtattttgctgaggatttttgcttctatgttcatcaggaatatttgtctgtagttttctttttttgtcatgtccttccctggtttcagtattagggtgatactggcttcacagaatgatttagggaggactccctctttctctatcttttggaatagtgtcaataggattggtaccaattcttctttaaatgtctgataaaattcagttgtgaatccatctggtcctagactttttttggtggtaatttttttattaccatttcaatcttgctgcttgttagtggtctgttcagagtttctatttattcctggtttaatctgggagggttgcatatttccaggaatttttctatctcttgtaggttttctagtttatgtgcataaaggtgttcatggtagcgttgaatgatcttttgtatttctgtggtatcggttgtaatatttcctgttttatttctaatttaacttatatggatcttccctcttcttttcttggttaatctcactaatggtctatcaattttatttatcttttcaaggaaccagctttttatttcatttatcttttgtagttttttgtttcaattttgttttgttctgctctgatcttgcttatttcttttctactgctggattttggtttggattgttcctgtttctccagttccaagaggtatgaccttagattgtctgtttatgctctttcagcccttttgatgtaggcatttaatgttacgaactttcctcttagcactgcttttgctgtatcccagaggttttgataggttgtgtcactattatcgtttggatcaaagaagttttcaatttccatcttgatttcattgttgacccaacaatcatttaggagcaggtcatttaatttccatgtatttcatgcttttgagcactctttttggagttcatttccagttttattccactgtggtctcagagagtacttgacataattttgattttcttaaatttactgagccttgttttgtggcctatcatatggtctatcttggagaatgttccatatactgatgaatagaacgtctatctgcggttgttgggtagaatgttctgtaaatatctgtgaagtccattttctctagggtacagtttaagtccattgtttctttgttgactttctgtcttgatgacctgtctagtgctgtcagtggagtattgaagtcccccactattattgtgttgctgtctatctcatttcttaggtctagtagtaaatgttttataaagttgggagctccagtgttaggtaaatatatgtttggtattgtgatattttactgttggactaatccttttattatataatgtccctctttgtcttttttaactgctgtcgctttaaagtttgttttgtctgatataagaatagctattcctgcttgcttttgatgtccatttgcgtggaatatctttttccaccccattcaccttaagtttatgtgagtccttatgtgttagatgagtctactgaaggcagcagaaacttggttggtgaattcttacccattctgccattctgcatcttttaagtggagcatttaggccattcatattcaatgttagtattgaggtgtgaggtactattctattcattttgctatttgttgcctaaataccttgttttttttttcattgtgttatcattatatatgttctgtgagatttatgccttaaggaggttctattttggtttattttgaggatttgttttgagatttagagctccttttagcattcctgtagtgctggcttggtagtggcaaatcctctcagcatttgtttgtctaaaaaaggccattatctttccttcatttatgaagctcagtttcactggatacaaaattcttggctgataattgttttgtttaaggaggctaaaaataggaccccaatccttgctagcttgtagagtttctgctgagaaatctgctgttaatctgataagatttcctttataggttacctgatgcttttgcctctcagctcttaagattctttcctttgtcttgactttagataatctgacgacaatgtgcctaggcaatgatctttttgcgatgaattttgcccaggtgttctttgagtttcttgtattgggatgtctaggtctctagcaaggccagggaagttttccttgattattccccgaaatatgttttccaaacttttagacttctctttttccttgggaacatcaattattcttaggtttggacatttaacttagtcttaaacttcttgaaggcgttgttcattttttattcttttttcattgtctttgacaaattgggttaattcgaagccttgtctttgagctcttaagttctttcttctgcttgtttaattctattactgggactctccagtgcattttgcatttctctaagtgtgtccttgaattccagaagttgtgatttttttttttttaagacagagtctcactctgtcacccaggatggagtgcagtggcacaatcttggctcactgcaacctctgcttcccaggctcaagagattctcctgcctcagcctcctgagtagctggaactacaggtgtgtgccaccacatccagctaatttttgtatttttagtagagatggggtttcatcatattggtcaggctggtctcgaactcctgacctcctgatctgcctgccttggcctcacaaagtgctgagatcacaggtgtgagccaccatgctcagccgtgattgttttttatgtatgctatctctctcactgaagaattgtcctttcatatcctttatagtgtttttgatttctttaagttggacttcacctttctctggtgcctccttgattagcttaataatcgaccttctgaattatctttctggcaattcagaggttttgtcttgtttcggtccatcactggtgagccgatgtgatcttttgggggtgttaaagaacctcgttttgtcatattaccagaattgtttttctggttccttctcgtttggatagactatgtcagagggaagatctgggattcaagggctgctgttgagattcttttgtcccatgggggactcccttgatgtggttttctcccccttcccctaggaatggggcttcctgagagctgaactgtagggactgtgcttgctcttctgggtctagccacgcagcggagctaccaggctccagtctggtacttgggagtgtctgcaaagagccccgtgactcttccatccatcttgtcatccatcttcgggtcttgcagccgcagataccagcacctgctctggtggaggtagcaaaggagtgacgaggactccgtgaggctccttggttgtgtttctgttgagtgcgctggttttgtgttggttgtgcttctgttgagtgcactggttttgtgttggttggcctccagccaggaggtggtgctttcaagagcacatcagctgcagtcttatagggaggatgcggacctgccctagggggacctggctaagtattcaggtttcccatgcagtgggcagggccatagacctcctaagagaggatgacctttgtcttagtaaccagagcgggtagagaaagaccaacaggtgagggcagggataggcgtgtttgagctcagcctctccttgggtggggcttgctgccgctactgtgggggatgagagtgtggttcccagtccaatggagttatagtcccagggggattatggctacctttgctgagtcatacaagtcgccagggaagttggggaaagccagcagtcacgggcctcacctcacacccacgcagctggcagtcctaaaggctggtctcacttccatcgtgaacccccaacagcaccacgtctacttctgggcagctggtagccaggactgagaacctgtcccagaccaccagcctcccctcttggaaagcaagcagactcacagtttttcagtgtctcagggagcctgtagtggagatccaccttcttcatatagtctgtggatgatcttggctttcctggtatattcctgtgctagttctgggtgtggtggcatgtgtctatagtcccacctacttggggggctgaggcaggaggatcactttagcccggaaggttgacactgcagttagcaatgatcgtgccactgcactcccctgggtgacctgctctagtaggtttggagagagctcacctgagtgttggttgttaaaaaagagtctagcacctccccacataccccgcttctctgcccatgtgatctgcacacaccagctccccttccaccatgaatagaggaggcctgaggccctcaccagatgcacatgctggcgccatgctgcttttacagcctgcagaatcatgagacgcctaagcctcttttctttataaattacccagtctcagatatttctttacagtaacgcaacaacaaatgaagacaatgaatgactctaattttaaaaatgctctctgaaatggacctatgtcaacaattaaaaggaactcagtatttctaaatttaagtttaaaccaggataagtgcatcactttaaggaggtaaaatgtatatatccttaatcttaattttatagggtcccatcgtctccaggcgatccctaaactagatttgtgtccacagttctttttccaataaaccttgttaagctgaaataaaataaagagctaacataaaggataatcacaataaaggcatcattcctcagaaggtcaccagatcgctcctgcttggagtcttggcttacatgttaccctttctgaaaacttccttttcatgttcgcctacatacttcatactgtgaacaaaatgcaatttcagtcaaatgaattccttattctatttctgtcatctcactaaactataaactcctggaacatggagaaaatgtcttctttgcttctatgtctctagcacctagctcagcctggttataaatcattcatatttcttaaaattttgctaaatgtgtagatttaaacccaatacagttcttatgtttattttttaaagtctgattaaaaacgttaaatgatatcatagattcaagtacacttacctctgaaaagattcaaaacacgatgctaaatgagtagcaaaaatgaagaggttttcaagggataaaataatttttctaaatcaaattatgcacttttttgcatttctttcctcaaaagtgaagatgcttttaaatgtttattatcaataattctcagaaagaaaattttttcttgtcttgcattcttattagcttattcatcaatgtttattccaccaatatgagcacacgtggtttttaaatttctttatcatcagaaaaggttatattgagataatgagtcttggtaggaaagagtcctcctgaaatgccagcagcccattaggatttcttacttaataaccttagcaaccaccaatactttcaacagtccttcatgacctttcagtttctatggacagttttggagtagggcagatgcttatgatatggttatcacaagaaaatttgtgtatttttaagatgctgggagaaaattttctgacagaagacatttctttcaagagcctctgaagagcacctatttttgtgtgagccattatggtacttaataattgagttcccagattctcacctttaaaggaggtaatacctttgttgaaattattatttattttgctccgttttttttctctcatttgtaatcaggaaaaagactgggtaggtggattaaaagttacagcagtctacacacatttctgaaaacttcatcaactcatagccaaatattttttccagttttcaggaatggcatttctccttagaatccaaataacaataaaacgccgattctgtaggcaacagacaggtcattttacagcccaggaaacttccaaacataattcccgtgaattctgaaggctgcctatgtcacgtacaaatccatcctcttgactatctttcctacggtgcgcgtttcttaaaactcagttcgggagcttggtcggccccttcgtgtctgattggtgagcacttatggcttgaccaaaagtgctcaaagcagaacaagaatttctgttttcatttccccctacttttttccctactgatttggattgaatgaatttccgttatttctttggctgttattgctgttgttttattatgctattttttttttgtctagtagttaccatcaaattttctaatatacattttatattttctattggtttatagaattcaggtccaaaaaagtaagaggaaaactttaacatgtttacattaaaataatctgaaattttcattgatgattattaattttaaaagtatgcatcagcaattatttagacactattatgttgattggtctttttatgttacaaagagtctagcgcctccacgcatccccccacccctcacctccattctctccccttgtgatctgcccacaccagctccccttccaccatgaatggaggaggcttgaggccctcaccagatgcacatgctggcaccatgccgcttttacagcctgcagaatcgtgagccacgtaagcctcttttctttaaaattacccagtctcagattttttttttttaattatacttgaagttctagggtacatgtgtacaacgtgcaggtttgttacatatgtatacatgtgccatgttggtgtgctgcacccgttatctcatcatttacattaggcatatctcctaatgctatccctcccccctccccccatcccacaacaggccctggtgtgtgatgttccccttcctgcgtccaagtgttctcattgttcagttcctacctatgaatgagaacatgcggtgtttggttttttgtccttgtgatagtttgctgagaatgatggtttccagcttcatccatgtccctacaaaggacaggaactcatcatttttcatggctgcatagtattccatggtgtatatgtgccacattttcttaatccagtctatcattgttggacatttgagttggttccaagtctttactattgtgagtagtgctgcaataaacatacgtgtgcacgtgtctttatagcagcatgatttatattcctttgggtaaaacaccaaaagcaatggcaacaaaagccaacgttgacaaatggggtctaattaaactaaagagtctcagatatttctttatagtaacacaacaacagacgaagacaatgaatgactctaatctgattcagtcttggtaggtcatatgtttccagaaatgtgaacacttcatctaggccattcaatttgttgatgcacaatttttcacagtactctcctataagcccttttaattttgttaaattggttataatatcccctctttcactttcaattttagttacttgagtcttctctctttgtatcttagtcattctagctaaaagttttcaattttgttgatctttttgaaaaatcaactcagtttcattgacttttctctattgttttctattccctagcttatttctgatctaatctttattatttccctcttctgctagctttgagtttagtttgtttgttttctattccttcgaggtgtgagtttaggttgttcatctgagatctttcttcttttttactgtaggtatgtacagctacaaatttccttctcagcaccgttttcacagcatcccagaagttttggtaggttgttttcatttttattttgtctcaaactattttctaattttcctgtgatttcttctctgacctactgtttaacagtgtgctaatttccacatatttgcgtattttccagtgttcctttgccactgatttctagtttcattccactgtggttggaaaggatactttgtattattattttaacctttttaaatttattaagacttgttttatggccgaatgtgtggtttatcctggagaatgttccatgtggacttgagaaaactgtttatctgctgttgctgagttccatgtgtttcttaaatagaggagactgtcctatcaatgtcgttaatatatcttcacagatttatgtctttaatccatctctattttgtatgtggtcagaagaaggaatccaacttaattttttagagttagtcagttttacccacattatccaaaaaaataaatgacacttatcttcaatcattaaaatgaagtcccacctgtaacctacaccgagttccttttcatacatgtatttgcatttttcctctgtactatataatttctaaaagcacagttgtcttaaacaaacccattcattacaaagtaattgatatgtctcttaatctttgctccctcctctatctttttttctttcaaatacttgttagagtggtttctttgtactaaagatttgggtagagtttggattttgctgattgtctcctgcgatgttgtctagtatgctttcttgctccctgcatttcctgaaaatttctagttaaatcagattcaggtttgagttttaggaagaggagactacttcctagacggtggtgtgtatttgcatctagttgtctcttttgctgatgttagcagctgcactacattctcattaggtgtgttctgtccccttcctgctacatgggaagcacttgggataatacatgctgtgttcatcactttctccccatcaccgagcaccgtttctggaaaaccaagggatccaatattatctaaatttttagtgaatacaggagctcatggttcagacttatctcttctactaactctaatagatcatggacaagatgcttaatttttgtgaatcttattttcacagtctgtaaaatgaagggattggcattaccatgccccctaatgttccttgaatgattctacaacatggccatgcaaaggtcaagaagataggctgtctttttcctccagaagttgcaagaaataaagaattccatcccatgcatatatactgaccaagaaatgttttctggggggacttttttgtttttctttttgcagaaacacatttgatttgggcaataaatttatacttagaatagaacagcgtttgttggttacatatatcaaaatgaagcaatgttcaattatgttcagttccattccatgatggactagaatataacaatataatacacatattataacgtaggtatgcacatgaacacatatgaataactaatttaaattctgctgagaaaaatgccaaaaccaaagagacaggcctattgtctataaacaaatgcatatattaagtaattataaaaccaccctccatctttcttgttgttgccattgttttagaaaaacggtcttgctctccggcccaggctggagtgcagtggtgcaatcatagctcactgcagctcaaactcctgggctcaagcagtcctccgaccttagtctcctaagtagccaggactgtaggtacatctcatctttactggctaattttctgctttttaagagacagggtctcgttgtcatccaggctggtctcaaattcctggcctcaagagatccttccacctgagcctcctgggtcattgggattacaggtatgagccaccacacccagcaaccttccattcttaaccaacttttgtttaatttccaacaaataacaggaaaaacaaactgtccaccttgaaaataatgacataaaatcatattcatctttttccatatatacacatgtgtacacatataacttttattaaaacaaatatacacaagcaaagatcccattaaagttcatccttggcagtaacaaggtgcagatatgagtaaaaagtagtaaaaacatgcaagtttactacatcatgggctatgttttcaaaaatacaaaatcaagtcatcttttggaaaaacaagcttcctcaacttttattaaaatttatatccagactaaaagaaaatagttaccagtataaaacaatatcagaactcaagttaacatcttatatttaactactttgagtttcctaaacattgtctaagcaaacacttattctctagcacaatggtcagagagttaatgaagatacaatttttctaggcagaaatcagttatgttctactatgcaaaccaaacagttgaattgattcttatccttgtatcgtaagcattgaggctcatccagtatttattagaatggtgcttggtggataatcactagtccctttgtgcaccaaaactcaagagttcttagaggcttgttccacatcatcatagaaagagaaggtaccactcatttttttattctaagcaattttctctacttctccttagcaaactagacacatctgcttcacacactgcaacataacagttctatcagaaattagagcaccagattatcacaataaaaggacaaagacaagtgtctcctttctaaaagcagtggtaatcagttggttttaaaacagccacgttcatcatattctcctgtaatcggaacacagaaatgtgtcctcataatcaaggtactcttttctaggaacatagcattacttcattattactaacaacacagcacagcacctaaataatctttttatctcttcaaagctgtagaggctgttcatattgcctaagatcaacaacattacaattgaaaaaaaaaagcagctagctggctaaaacacacacaatgcacacacacgcacacagacacacaaccatacacaaacttggtctctcacattaaactctgtaacagtaaaaaacactcctaaatagttgtttctattaaactgtttctgttccagagaagaaaaatacaataatatatatgattaggggtcatgattctaaaatcattaactttattttttttttatgattgtggtcccatcaatttaaattttcctttacactttcaaacaaggtggccacacactcgactccattgttcttctggggttagacaagtgtgaggtgaccccagttagggatgccccaacaggcattaagttgacagcacaagagcttccatcgcaaccctctagacactgcaaccgccacaacagtctcttggtactcatttagtgtcttactaaacgtttaccttgtcaatgatcattacattatgtggatactaagactttggttagatatctctaccttttggcctttgtctgtattttacaaatttagtttacattcaatctttggtcttctaaaagacctttggtaaaataagtacacgcttatcagcaacataaatactggacacaactaaaatcactttcatttattccctaaattctccccctacaagttctggagatttccaaaaacttgtaatcaacatagcaaagtgggtgctaccattgcaaagattagagcacttttttttttttttttttttttgagacggagtttcgctcttgttgcccgggctggagtgtagtggttcgatctcggctcactgcaacctccacctcctgggttcaagcgattctcctgcctcagcctcctgagtagctgggattacatgtgcctgccaccactctcagctaatttttgtatttttagtagagacggggtttctccatgttggtcaagctagtctcaaactcccgacctcaggtgatctgcctgccttgacctcccaaagtgctggtattacaggcgtgagccactgcacccggcctagagcatttttatactgtacacaataactttttaaaatagagatgctttattttctagcataaaagtagaaaaaagtaaaaggaagaatggaacaagaaattttgaaaattatgttttcaaaagaaaaagctgcttatagatcatgctcacgtaattctccaatataataattcagtcctttaagatgacttaaaaacatattccaaatgtgtttgcttattcacagtgaaatatttggtgatgaatcagaggtagtccaaaaaatgatcaaaattcattacctaacattcatgttgaatgtgtttaatcactaagcaattatggatttaatatctaagattgattatccagtcaaatcgcctcccagaatatttaaaatcaagttgctctgctgctttgtcagaaaaatatgtgattgcttatgcatgtcaatgatttacacatacacacatttggtaatgagacatacaatagagcaaactgaagttattcctttccccaatctatagtatctattaactctttagttttaaacaaagaaaaaccatattttattttatttattttttattgtactttaagttctagggtacatgtgcacaacgtgcaggtctgttacatacgtatacatatattgtaccaacatacatatgttggtgtgctgcacccattaactcatcatttaacattaggtatatctcctaatgctatccctccctcctccccccaccccacaacaggccctggtgtgtgatgtttcccttcctgtgtccatgtgttctcattgttcaattcccacctatgagtgagaacatgcggtgtttggttttttgtccttgcgatagtttgctgagaatgatggaaaaaccatattttataagactatgaagcttacagaatatagtatatgtagtacgtcccaaactaatctgttccaacaggtataagaaaaatacaacaatatatgtttaaaagttacattcactaaaggcaaaaaagataatcctacatggtttagattttccataggagaatacagttgaagcaagctctgcagtgataatattcaaataatttatgtaaattagaatggtcaaatgtttctgtctatgcaatccaactggatgttagtgtaggtacttaagttatagaatgcttataattgcacagcattccagtaactgatagaagaaaagacaatgatagatgctgatccttattccacgtcaaatggccttgtatagactttgcctaaccagagtctcagatcccactgagtgcttttcaaaaggggcatttttccctgttataacacaggtactatttttggcctcacaaagccttcagcctagacagtgaaatcccagctatagacacatgcaaataatcctagaatttgcaaatatgctacagaaaatatcattctctcttttatgtcaaccctcacatcaccactagtactcccataggcaaggggagactggcaaagattctttacactggaaacaagtgattctgatagactgcagatacttacctcaatacaggttgatagctcattaacacagcttagatttcatgaaaaagtctgcttcctggccggcgcggtggctcatgcctgtaatctcagcactttgggaggccgaggtggatagatcacgaggtcaagagatcgagaccatcctggccaacatggtaaaacaccatctctactaaaaatacaaaaaaaaattagctgggcatggtggcacaaacctgtagtcccagctactcaggaggctgaggcaggagaattgcttgaacccagaaggcagagattgcagtcagccaagactgtgccactgcactccagcctggtgacagagcaagactctatttccaaaaaaaaagaaaaagtctgctttcttgactaaggagcacatgtccagtgatgctacacgatactacccaggtgcccattagcagtatgcaacagtcatttgataagtcctaatctaatggtcttgaaagagttaatcttccaaacagactacaaaatagtttgtacactgaaaatatcaagcacaactgattacatatctgagtttttcaagaggaaaaaaacacagagctaagggcgatctacttattgatatcacagtgaagaaccggagaaaacacctcgaatgattatgagacttctacatggggattctggtaggggaaacctgggtattttactttgatctttatgagtagctgtttcattggcaatattctaactatctgatggtagtggaaaatcatttcaatatttgaaagttacatacttgattttcaggtgagctactcatggcaattttttaaagggcacagttttctattcactatgtttgctgacatacaattcaaatatagtacaatacagaaataaagacataaaattccataaagaacaaaggaatcatactgtgtacacttagcaacatagtaattcataccaagcatcaagaaaagagtgtaaaataaactgcaaaaagcgctcagttgagcatggttgattttttaagtttcggttatctgaaatttggaacactggcctaaatgttatctttactatttaaatgtgattttgataagaactcagaacttttacacataaatgacttgggtaacgttttggagacaatttacacacacacacatacaccaacaatgacaaacataatttggtgttttccaaatatgcttaatgaaaagaatcattagcaaatatatccagataactttttgtcttacgtatatagttgcaaatcagcaatttattctagtatgtgacactttgctacagacttttaaaatacaagaaaacatggttatcatctgtagcaaaacacttgatacgacatacctcacagtagtctcaaataacaatttggggtaaactgctgccaaagtttatgaaaccatagttttgtgatgcattttttctctctcagactttcagtactattagggcagtgaaattctaaaatgaattactgaagaatattgttttgcagtatctataatagaaaagctatctggtttcattatttacttgcacaactgaagtgtccatctagaacacagtcagcaccgcatcaaacagtctacagcaacttgatcctttgtcatttttaactgagctcgttcgacaaattaatgaattaacagagatcaattcaaaagagctgctcagtgacacaataataacaagcccaatgtctaataaagttaaataaaattttatacataactgctgctttaaaatcccagggtaattgacacctgaataagagctctgtaatataatttagttctttttattattattattattattgtactttaagttgtagggtacatgtgcacaatgtgcaggtttgttacacatgtatacatgtgccatgttggtgtgctgcacccattaactggtcatttagcattaggtatatctcctaatgctatccctcccccctcccccctccccccaccccacaacagtccccagagtgtgatgttccccttcctgtgtccatgtgttctcattgttcaattcccacctatgagtgagaacatgcagtgtttggttttttgtcctcggaatagtttgctgagaatgatggtttccagtttcatccatgtccctacaaaggacatgaactcatcattttttatgactgcatagtattccatggtgtatatgtgccaccgtttcttaatccagtctatcgttgttggacatttgggttggttccaactctttgctattgtgaatagtgccgcaataaacatatgtgtgcatgtgtctttatagcagcatgatttataatcctttgggtatatacccagtaaggggatggctgggtcaaatggtttttttttttttttttttttttgaggcagagtctcattctgtagcctaagttggaatgtactggcgcgatctcggctcaccacaacctctgcctctggggctcaagggattctcctaactcagtctcctgagtagctgggattacaggcgtgtgccaccatgcccagataattttttgtatttttttagagatgggatttcatcatgttgcccagggtggtctcaaactcctgaactcagttgatctgcccacctcagcctcccaaagtgctgagattacaggtgtgagcgactgtgcccggcctatgatttagttctttatctggttgcatgcacaacttgtaatatagagcagcaaacatttatgaccatgagtatagctacccaatgctaactctgccagctgaaaggtttgtggtgttggttgtggttgtgattgttgatgagccattaactgatttatgttcagcctttccctctgtaataagaggcactcaccccactttcattgtttgttccatttacagaaaaaaaattgttccatttgctcatttataaataaaattctctttcatttttctgctagaagtcttcaaaaagtgaagaagaatgcaattaccccttttgtggcactcatttacaataaaagtttgcacactccttcccctgaatgcattcagcagcttactctcaccccagccctgaaccgcattcctcagttaacatgtaactctccatacattctgtacttctcttgactagtagaattggaggggtttataatgctgacagcacgttagctcagaaactatggcagcagccaggtaaaagttggaagtttcctccaccactctgctttcccagacatctgtcaagagcgaggccttgcgcagcgtgtccatctcacccggaacgtggtgcttttttaaacggagtccacctttactacattattgttggtcatcagtggagacggtttccatttaaccctatcggccacgtcgttagagctgtccacaaagaacaccctggctgtacagagcgagactataattctcctgtattccttcctgaaattttggttcagtagcccgtatataatggcattgaggcagctgttgaaatacgccatgtagtaactggccacaaacagccactctgggatcctaggcaccatgctggcggggtcagaggccacggccaggccaatgaagttcagaggagcccagcaaatggcaaaaaggacaaaaaccacaaacatggtgacaaaattcctgaagtcctgtggtttcagtttgggtttgcggtcaggtttcaccctctgtctgacctggagaaccaggatccatattctcaggtaacagaagatgactatgatcatggggacgaggaagtggaaaaccaccacggcgatggtgtaggcggagctgacggactgggcgaaggtgcacgagtagatcctcgggtcgtactggagagtccctgcacggaggttgggcaggacggccgccagcgtcaggagccatatgaggagcacgtagcagagggagttcttgctgctgtacagtttgtcgtacttgagactgtggcagatgtagcagtagcggttgatggcgatgccggtgatgttgaatatggagccgatgacgctcaggcccatcaggaacccactgacttggcagtgcagatagcccaggttccacccgttgttaaatatcgacatcagcaccaacgggtacggataaatggccaccaccaggtctgccaccgctaagctcaccacaaagatgtttcctgaaagagaatcgtttagaaaatacagtgaataccagttcacagtgggttttctgttacaattgttaaagaaggagctgcttctgcagctccgatgacctgacgtcacagcggcggccgcactgcaaatgaagtggaggccgtttcccaggagggccagtccactgccgctcctgacacatcgaatccgctgttcacacattcccacctccccagaacagggcctgttccatgttcaaaactgctgtctttcaaaccgttcggcttctcatctcttaaaaagtcctgagatcagaatgcttgcacaccatctgttgttctggagccttctacatcacctgagaaatctcatatgatgtcaagccagccacaacttccttaagttcaagtcttcattccctctgtagtgcttcagcagctctcagggggcctctagcttctgttcttgctgatcccatagagagggagttaagggcaagagggatctgtcgtcagccgtctggatgagaacatggcttcactccttactaactgtccaaccggggcaagttacttgatctccccaagcacctgcctcctcccctggatgatgggataatgagcagcttcctcttagggctgtggtgagcacgagatgagactatctgtggtgagcgccatgtaccgtgtcttacaccatagaaatgttcttattctacgactccctcaccttgaaccaaaggaaaatgcagaaattctcttagatcttataaagaacttacgttacaaaacttaaaccctaaatagtctgttaattttctcaattaatataacaacacatatttaattacagaaaaaaaaaactctagtcacttttttatttttatttttttgagacagagtcttgttctgtcacccagtctggagtgcaatggtccgaccttggctcactgcaacctccgcctgcagggctcaagcaatcctcctacctcagcctcccaagcagcagggaccacaggtgcacaccaccacacccggctcgtttttgtatttttgtagagacggggttttgccattttgtctaggctgctctcaaactcctgggctccagccatccacttgcctcggcctcccaaagtgctgggatggcaggtgtgagccattgctcccagctacattagtcaaatattatgagatgttctgcaaatatgttttttttcttttgcggctcttctgcctctgtttcttactattccttctgcctcgaatggctcctcacatcaactttctaaatcctgcccattctcccaagtctatctcaaatagaaatgccagaagcctttgctcatttgcccacctagtggtaagagcttcctcctttgaagggtcttaaagcactttatactgctttttactcagattaaattataataaattcaattcagtttacatattaaatgcatatatttggtgcagggggaaacaggaattgagagacaggaaaagtcaaaaagattacactagagtggttgggcgcagtggctcacacctgtaatcccagcactttgggaggccaaggtgggtggatcaactgaagtcaggagttcaggaccagcctggccaacatggtgacaccccgtctctactaaaaatacaaaaattcgctgggcgtggtggcgggcacctgtaatcccaactacttggaaggctgagccaggagaattgcttgaacctgggaggcagaggttgcagtgagcagagatcgcgccattgcactccagcctgggtgacaagagcaaaactccgtatcaaaaaaaaaaaagaaaaaaaagaaaaagaaaattacactagagtaagcagcagcaccagagcacgcacagaccagaagctgtgaggaaaggggtgcgctggacagggacagagggagccccaggtggacggacagaagatttcgccttctattctattgacctgtaggccaggcttccctgcgtctccagatggtggccctcgtgagtacatttcctcatatttgcgtcctagaccacacccaataaatacagtgacttttgctcatacactcaatgagttcattaaactgtcacttcccaatatttgaaatgagacagcccatagcagtcaagatgagagaaaggcaaaatttgtgccatttatttaggaatttcagataaattgtcataaaagcaaatactttaaaaattggttgtattcatccaaattaaagttacaaaggcaaatttattttcccacagatcactttcaattagcgttgaaacatttaaattcctaagaggtgtattttaataaattatttagctcaaaatgtttaatgctttaaaagcatctataatatgtgaaattctgttccaaatcaaactgtcattgtaacagcacatttgttcccagagtgtcatgatgacaaactggcctaatatggatttatttttaaaagagcttaaaaatgaaatcacaaatgatgtcataaatttctttcatggctcgaataccctgcttcatttattttatagtaattatgttgcattacaattcaagcaattacattaattagatcattgattctttgaattaatcccattttacaaatcttggtgaaaattaattaagccacagactccccacaggtgcggctgtcaggtagctcacataaagctttagcaccagtgttcatgtgtgcctggggggtgtgtggtgtctgggcggagaaggaaaaagggaatttccttttttcttttatgaacttcaccagataagagtcattaaatcatctaattataattatacacattataagttcatctattccattctcaaatctatgtaactccagacatatggacaatctacccatttttacagatatccaggactgtatgcaacaagcttaataatgcattctgaaatgtaaaataatgtctgttcatgggtaagaatttcttctctgttgaatatagttccaatccttactgtggcagaatcatagaatcataggatgttaaaattgagagatgggttaatgatctccctggataattcctactttttaaagatgagaaaacaaaaatatagagttaaattggatgaagtcgtacgactacttagtgaaagagtcaggattataccaatgctatgaactggtgagtgttgttcaatgttatttccctgagaaagctcctgtgctcctacagatacgagactcagaaactgggccctgtggctacgtcctggcttacagcctctccaggcacaattctgaagaagcgtatttgaactagaacattctaaagagaagatgggggaggaaaacacctaagtcagtatgctggcaacaagacgaacagcgatcagccttgtggtgattaaaggcaccaactataaaatgcacagtcaatatttgttcccaggaataaaaccttaaagtggaagtgaaatatggcacagatatgaataaaataaggtaacagacaactaaaatgtcagcttgctgggagtaccttcctcagaactagtcctgtgagtcccttctgggaatgacacagcagcacgacgttgcttttctgtttatcgcgattatgtctctacttctccccatctcccacagccccagctatcacctcggtgaggacactgcctgtcttagatatcttctccctccaccttgaacagtacctggccgagggttaatcgatgcacagtgggtttatattgtgtcaacttcgcgaagctgaaaagacttttccttgcaccgctccgggttagtgttccccacaagaggcaattgcgtgagattttgaaggcggaagtgcagcagtagcttgctctctgccctcagtatgtctgtgtcaagtgccagacgccaccacaagctcggcactccgagtctcatctgctgccctgcagggggtgggtgacggcagtgtgctcacagcttctccagctcctgctcacctcctcctggcttgagattcgaccatcctccagagctccagtccctcctcccaggttctagcttcccctgcgtcccctcctaacatccagctttccttcttaaatccgtggactttagacagcagcaccagacacagaagcgaaaacctcaaatacgctatttaatcagctcacacaactgctctagcaattttacttcttggattgattgaacccagactgatacagaatttggttctggaagtggaccaaggagaaccttcaggatggtttctctgtattggttttgggttacctgcagtcgattctgtaataggactagctttaaagtattagaaatcctatttccagtagttaagggacactggtagtcacggcctgcaggggcaaaagaattccttaaaagaccacctgggctgggtgtggcagctcacgcctgtaatcccagcactttgggaggccgaggcgggggatcacgaggtcacgagatcaagaccatcctggccaacatggtgaaaccccatctctactaaaaatacaaaaattagctgggcgtggtggtgcgcacctgtagtcccagctactagggaggctgaggcaggagaatcgcttgaacccagaaggcgaaggttgcagtgagctgagatcgtgccactgcactccagcctggcaacagagcaagactccattaaaaaaaaaaaaaaaaaaaaaggccacctgtattcaccttccaaggtgaaaacaatgtcattgcatcaccctccaaccactaagatgaaaaacaaaatataccaaccatacaaagggttggacgtattaaaccaacccatttcctgagtgactcaaaaagctgtcagtgttgactggagcccagaacaaggccctgaaggctgctcagccacctgatccatctgatccaatggctatggtctaaatgtgtctcccccaaaatttatgtgttgacacttaatcgccaatgtgatagtattgagaggtggggcctttaggaagccattaaatcatgagggtggagcccttacagataagattagtgcctttataaaagaggtgccagggagttgttcatctctccaccatgtgaggactcagcattcatctgctccagaagacacagcaagaaggcaccatcctggaagcagacagcagccctcaccagactccaaatctgccagtgcctagattttgggcttcccagcctccagaactgtgagaaacacatttcagttatttacaacttcccagtctacattgttataacagcaggaacagattaagacaccaatggggcttgaattgtttatagggttgtcccttggtatcagcagggactgactccaggatctccatagacacccaaattcatggatgcttgtattagtccattctcatgctgctgataaagacatactcgagactgggcaattacaaaagaaagaggcttaatggacttacagttccacgtggctggggaagcctcacaatcatggtggaaggcaaagaagagcaagtcacatcttacgtggatggcagcaggcaaagagagagcttgtgcagggaaactcccccttatagaaccatcagatcttgtgaggcttattcactatctcgagaacagcatgggaaagacctgcccctgtgattcaattacctcccaccaggtccctgacaacccatggtaattcaaaatgagatttgagtagggacacagccaaaccgcatcaatgctcaagtcccacagttggccctgcagaccctgtgaatatgtgaagttggccctctatgtctttgagttccacatccctcaaatattgtattttcaatccatgattggttgaatccctggatgtggaacccatggatatggagggaccactgcatgttaataggaaggctgtaaggaggccttagcaggcacattcagatgactcataacacagacccttagtactttgcagcaaatctgtgctctcctttgcagataccgttttttacttcctacttggccttggtagagtctgaatgctcgaacatggacccccaagtgaccatgtgatctgaaagctgtctgaaggaccaggtgctgtctatctgaaggaccaggtgctgtctgtctgaaggaccaggtgctgtctgactgactgaaggaccaggtgctgtctgtctgaaggaccaggtgctgtctgactgactgaaggaccaggtgctgtctgtctgaaggaccaggtgctgtctgactgaaggaaggaccaggtgctgtctgactgaaggaccaggtgctgtctgactgaaggaccaggtgctgtctgactgaaggaccaggtgctgtctgactgaaggaccaggtgctgtctgtctgaaggaccaggtgctgtctgacccaccaaatcaccaaatcacaaagttgcccatcacagcatcaaacagaagccgcacatccaagatctggctccggcagctcctgaaggcacagggaagatgcaagagcaagtggctcagaggccacagcctgcgttcccaccaccctgcctccattccctcagcatgctcctatggcctcatgaggacgtgcccctgaccagctgaataagaaagaaaaaaaccttcttgcctggtttccacatggcttttcatgacctactgacactacctgaaattggatggttgcagcactacagacccaattcagtacagccctgaaaaacaaggatggaggaagaccctcccaggaaacagaactttgagcaatgcttcaaactggttgttcatttttcctggaaggagagagggccacaggtttagatctgcactgattaatgggcagtggctaatggtcagctagaccaggggtccccaacctgatggggacagtagctaatggtcagctagattcatgggcagtggctaatggtcagctcgatcaggttggagacggctgatctagctgaccattagccactgatctagctgaccattagccactgctctagctgaccattagccacagactgggtccgtgacctgttaggaaccaggctgcacagcaggaggtgagcagcatatgagcaagcattaccgcctaagctccccctcctgtcagctcagctgtggtatcacattctcataggagtgcaaaccctatcgtgaactccatgtgagggatctaggctacaccctccttatgagaatctaactaatgcctgatgatttgaggtgggacagtttcatcccgaaaccattcccccaccctgtcctgtggaaaaattgtcttccatgaaaccagtccctggtgccaaaaaggttagggaccactgagctagatgggcaacgatttggaagaaacataattagaaaaccggttatggggctctggggaagacgtagcacacagacctctcagaatggacacttggtgtgaagatatttgtgtcttgatgatgcaacctgtgtatatcagttaatctgtctttggccaccagtccttgaccaatgggctcacaaagttgtcatggcagcaaggatagaagttattcatgagctcagcatcagattactcctcatgaaaactgatctggatgcagccactgctgcactgctgaatgtccagcctgccaagagtggagataacaccagcggagcaccattccctgggaaaatcagccagacgctgctggtaggtggattacataccacttccatcatcaaagggagcagtggtttgttctggctggaacagaggcatactctgaatatggatgtgcctttcctaccttttcaggcccttaaatcttccagcaacctaacacccacggacgtacaggacgccttctccaccgtgatggtattcctcatggcgttgcttttgactaaggaattcctctgacagcaaatgaagtatagcaatggggccatgtcctgggaattcactgcccttaccaggtttcccatctcaaaacagctgacctgatatgttggtggaatggcttttgaaggttcagtttcagcaccaggcgggtgagcctagggtacagatccctatcatgtggcacctgctctaaatcagtgattaacatagaatgttgttcatcccatggccaggattcatggatcagaaaatcaagggtgaaaatggcagctcatcctctcatattaccctggtgataccctagcaaaatgtttgcttcctttctgtgaaactttaggttctgttggtctaaagtcttagttcccaagggagcaatgcttccaccaggagatacccctttggtttcattaaactggaaattgaggctaggcacagatcctggcactttgggaggctggagtgagtggatcacttgagcccaggggttcaagacctgcctgagcaacatggtgaaactccatctctacaaaaaataaattagccaggcgtgcaggtgcatgtctgtattcccagttactcgggaggctaaggtgggagaatcacttgagcccaagagttcaaggctgcagggagccatgatggcaccactgaactccagctcaggcgacagagcaagatcctgtctcaaagaaaagaaaaccagaaaactggaggttgagagtgccacctgctatttggggctcctcattctagtgaatccatagacaaggaggggggttactgtgcttaccgtgtttagtcctgatcatcaaggggaaactgggttatgattgcacagtaagagcaaggaagtatagatctggcatgccagaaatccctcgcgtgtctcagtactcccatgccctgggattgaagccaatgggaaaccaaaataacccaatacaggcaggaatgccagtgtcccagagtgttaggaatgaaggcttcagccaccagaacatgcaaagagccagagggcagaggaaatgaggagggaatggtagttccaaatacccactgtggccacctggccaactgcagaagtgagggctaaaataattatgagtatttcctgcttgctttagcatgaacaatttgtgaatatagtaataactttgtgtctctttccctctgctattcccctaccatctcatataagatgtgttaatagtgaaccttgtatctcagaatgtaagttataggatatcaaatggggaatgtgactcaactagaataataaaaatgatgtaaagttgcataaagagactgtattttcttttacaaagagggttaatgtattttcaattttacacgggatagttgctttgttagatggaagcataattttgatgtttcctttatttcgaagttaaatatggttaaaagatatagctagaacccaagttgtcaaggggtggactgtgttgaattagtattgtgtcaacttagctaaattggaactatgctccctagaattctgttttctgcataattataggatagcctcacccacaaaagaattttgtataagatttggaaggtggaaatgaagcagcagctatttttttcattttttcttcttgagatggagtctggctctgtcaccaggctggaatgcagtggtgttatcttggctccctgcaacctctgccgtcccccacccccactgggttcaagcaattctcctggctcagcctcctgagtagctgggactacaggtgcacgccaccatgcccagctaatttttgtatttttagttgagatgggatttcaccatattggccaggatagtctcgatctcttgacctcatgatccacccacctcggcctcccaaagtactgggattacaggcgtgagccaccatgcccggcctgcagcagccatttgtgtaatgcttttttatgctagatatgccgttattaactagtaaaagccttaactaagtaaatctacaggatcttcctatcctgggccagactcttaccttttatcagtcatttctgctcttttttagaaatcccacactgcaatcctcaggctgatttgcatttgaatgaatacttctgcatcactttgcttttttgtgaattacacagaaatctatcaacctatctgacactgtgcaaagtgtggaccctgtgtctgaagttttcatgaacaatgaaaatgtgtatttctgaaaaacgtctgtttctacagctctagccatctttttcctcatttgataatctccaaatctgtgcaatgattaaccctgcggacactttctttccttctgcgtgtgggttagcagggcccattaccacagcaagcctgggctccaggcggcttctgctcatcctctgtctttcagaggtgttgtcgtagacgctgctggcgcatttctccccaaagtgtctgtgagttctgggagccttcatttggcaaggactggatccttccccagagactgccttcactgatcacagagccactgaatggggtacaaacgaccagtccctttgcctcaagtaatggcaactccactggatttacgcccagaggccccaacttatggatgaggccaagtctcagctttccctgagaccccatccctccctgaccctttcccctgccctgatctgctctcctctctttcttacaagctccccctgagagtgctccctcagcaaagcacgagtaccaagcctctgtctcaggttctgtttctagcaaacctgaaatagaccttcagctctatgatgaggttgggtggtttcctaaagaggtcactggcttctagatagaaaaaaagagctacttactatggtgtcttacagacacgagccaaccataccgggtaggagttacaggctgtagctgcccaccggcactgctcttccatgcttccaacctcactacgtgtgcatctgcttccaatattgaggcaacatgaaaacacacacattcgcacagccgtctgtctccctctgagactcaggtcctcactgtggacatgaaccttcacattctcacggtgagcacagagcctggcccatattaggtgctcggaaataatttgctgattgaattaacgcaccctttggcctctgaactactccctcagaaaagcagaaattacttgctcttcctgctcatatccactaagatgttggtttttcccagcaggtcaatattcactccttctttcatttcagcctggactttaaccacgtggaaagcaagattagaggccccctgaatagtactgttcacgaagactaaaaggaactgagtgtgcctgagcttaagcatcacgaagaccagtaataaagaactatttacaaacttggtttgtattttttaaaattgcacgtgcatacatgttacctgtatgataagagaaagctgagctaccgcaggtgtgtagggaatattctctggcagtacaagggaaagggaagggctttacttcgaggcatcaaagcacacagtccatgttttagattcttaaatgtaaagagactataccttagaaaagtgtcttttcagattactagaggcagtgtgcaccatgagtgtggaaacaaaagccggattcagatcccagccacgccacttgctaacgtgacctcaggtaagtcacagcttcccacagcctcagtctcttaatatgcaataaatcaagctgcttagggccgtggtgaggatttgagggcgtgtggcccatcttcctttgcaggattattcactcatgtcttatttctgttcccctgtgatggaaaccacacgtcttgcttcacggaaggttcctccctggcacacagtcctggctagggaggatcctccctgatccctgcaatggaacaggggtctctccatagccgatgagcctcctctcatcccccacccctcctgccgtcggcctcactgctcccctcccccttccacacacggctctccacagcacacatgacagtgcatcaccccgcaatgcccaggcttcaatagccctgcagtattcagtgacatacttggtgactccttctcccagcctttaactccttaaactccccaaactataataccctcttcatgtgacacgccatccacatcacaccccattaacgggatatgctgtccacaccacaccctgttcatgagacacgctgctcaccttgcaccctgttcatacaacaacacaccatccgcctcgctccctgttcatgccacccacatcacaccctgttcatgccacccacaccacacctgttcatacaacacaccatccacaccacaccctgttcatacaacacaccatccgcctcgctccctgttcatgccatccacaccacaccctgttcatgggacacaccgtccacaccacaccctgttcgtgggacacaccgtccacaccacaccctgttcgtgggacacaccgtccacaccacaccctgttcgtgggacacaccgtccacaccacaccctgttcctgggacacaccgtccacaccacaccctgttcctgggacacaccgtccacaccacaccctgttcctgggacacaccgtccacaccacaccctgttcctgggacacaccgtccacaccacaccctgttcgtgggacacaccgtccacaccacaccctgttcgtgggacacaccgtcctcacaccctgttcctgggacacaccgtcctcacaccctgttcctgggacacaccgtcctcctcacaccctgttcctgggacacaccatccacaccacaccctgttcatgggacacaccgtccacaccacaccctgttcatgggacacaccgtccacaccacaccctgttcatgggacacaccgtccacgccacaccctgttcatgggacacaccgtccacaccacaccctgttcgtgggacacaccgtcctcctcacaccctgttcgtgggacacactgtccacaccacaccctgttcgtgggacacactgtcctcacaccctgttcatgggacacactgtcctcctcacaccctgttcctgggacatgctgtacccatcacaccctgttcctgggacacaccgtcgtcccacacctggttcatggtactcgcggttgtctgaacaccctgttccatctgagcacctcagggctccgttgcctcctggattccacgtgtcctcctggctcattcctctctctctctatcccactctgtctctagttccccacctgttctctaacttgactgttgactgctgctgtagagaaaactagtagaccttggcactgctttctattatacacggtattgtacactgtacactttacattgtacactgtattgcatatacactgtatatacaatacgagagaccaaaggcacctgaggtgtctttaagaaatcatacacattcctgcttgttcccatctggatttcagtcagtgttaaaggtgtaacatcctgcaaataatcctgctcattttctatgcccagtgactgtcttctgagaagggtggtttagtgaggcatttgtaacttgtaaaacatccacagtacagcctgactggttcagcctttcacccttaaatggaagacgaattactgatactgtacctttattcgtcttagagaatttaggatgaaactttaacaaaaacaaaatcataatccttcagcgacattaacaggcaatcaaaaaaaaactatatgaactctctttagggtaggagtcttttttcccttaggcacttttccgaaccttgaaggactcagtgaaaaccccatcttaaataaacagattaactgcactaaataataactctaaattgctaaatccaaaagagagttttattaaaaatggtataatcataatagaaccctatttatatatgaaagttaaatcaatgacaggaaaatatgttaacactacaaaagtataaaataatattctcataaaagtaactttttaaaagttaaaactttgactctatttttatgtacttacagagtatttaaagacctgtaagtgtgaaatattgcattctgccttaaaaataaaaatatgtttacacatcagaactctacaccaagaatactaactaacaaaaggaatttattctgctgctgggaatgttatatttaattcataatgcactttaagtatacagcaagccatttagtccttacaatattagtattgtcccaaattaacaagtgaggaaactgagcaaattaggtcacttgccctatgtcacacgcatgagatggcaaagcccgggttttactccaggcatctggttccagaggccatgtgtttcagagggacacatcccaaaaaaaatgacctataatagcactaatcttccatagataaggaatgcttaatctataaagatatatatatatatatatatatatatatatatatatacactatatatgtaaaacaatcttttaaaaaaagtacatggtaaaagactatatgatacctacacagacatatacacaaatgagaacagttggaagtattccaaattcagagggaacaacgaaaggagctaaaaaagataagtaaataataaaaggaaaaaatggaatgaaaactaactggcaaaaaatcttaaaagtaaaaattgcaatttaaaccacatcttaaaataaaaatgagtgaaccagaattttctcttgaaacaaaatcgtgtcctaagctcctatagatggatataggaggcatccagcaagcatttaaataaaggaggagggaatgaatgcaggaaggatgaaagcacaatatcccttccaagaacatattcctaaatatgttcagaaaatcatcaaagaggaaatactaattactgattacacatttttataatccaccacttaataactatttgagaaaacaagtataaatgtaagttagcaggctagttctccagcaggcgtttcttcgaaagacctgaagccagtgtgttcttcactaatagttatgccgtgtctctaccactgatcagtttctttgaaattctctcactaattccgtctcaatctgctgctatttcacatgtgaactagttttcacatctcccagttattacattgttctctcctcgtaagataacaactttaaaaaattctcatgattgctttaagctccagctaccatctaccagccaactttcgcatttctcttgaaaaagttttctgctgtataaatatgctcctattttcatacttttgtaccccaagtcttctctttgtttgaaaataagaagaacacacatttctaaagtgcctcgatagaaagtaatctctttgaaagtcggagccgcgtttgacccacgcttagaacaggaccttgaattttgacaaacctgcaaaaatttaccaaccatttacattctgccttatactctaggaatgcagtaagtatttatccaggtaaatgttcagctcaataagcaccaaaactactcagtatcaaagcaagtgagcacgcttttaaaccgtgcaccctaacaactcaaattcacctccattaacttaaataatattcagcaccgtgcaaatgcattttctctcccgtctcttcttctgagactgattccttcaatggcattgccgaaagtgtatacagctctgtagaaagacaagtgtttgagtacttcatccagagaatccagcagtttatttcttatctgcagcattatttaactgcactaaaaatcacagagatatcacatacagcgctcaggttcctggtcaccttgattatttgagaggggcagaagtgaggctgctgatcatcttcatgaagaggcagagatggcaccaatgataccgtgcagagttctgtgcattcataaaaacgcttctttaacaacaatccactaattgcctttttggtactagaaaactctaaaggagtatgtgagtttcctttttagaagaaagggtatttctgtcagcgaggcaacttacaaatatgtagaaaaaagggaaagcttaaggcaccttgtaaagatcttaccattcatttcagttattctgttgattatttttaaaaggtgctaaggaagaatgggcagaatgagctccaaagactctgtggagatttaaagtgacttccaaggcatgatagttttcagtgtagatgctttttaaaacagaaccatcaaatggcagtaaatattaatagaaggaggtctaatctaggactattttatcctaggttaactcccaaaattgccaagagaaaaatgatgctgaaggcaagcaaaagtaagctctatcttatctgtgattaatttaacactgaaaattcctgccagaaatactttcttacgaaatgaatagctggaggaacgaaagatcagacaaattcaatcatgtatttgagagtctgaaactactgtcataagatttacaggggattctgggaattactttgacatatttgtaaaaacttagggttcataacaatgtactatacaaaccaagatagaaagtcatagaaaactgaacaacagctaagaatacaagggggaaaaatcaataaaatgtctctaaagtaaaaaattgccttgaatcagtaatttcaaatattgtggaaagcaacaggagggaaactacagcagcgccaacaagaaacctctcggcttggagatcgcatgaagtggggttagcttgaaatcattttccaagtctgtacagtacaagttacgtcgtaggtttttgaatggtagcctgcttgcccaaggaagctactgtagcttctagagctgattcacttaaaattagagaacagctgaatatcgaaataatcagtctttaaatctcaggccttcttgctgcagagagataatggttgttacaaaagggaaaactcagacaatggagattttgtgtattttgcataatgtcacaaatgggaattagattctaaaccttccatttctggttgatttcactgttttccagttcatattgtctacttgtttttttttttaaacatacacttaaaaaataaaaacaatctaaaaagaactaatcaccagatgcgtactagcattaacatcataatactattatttgtacctcataatgatagataggtgggtaggtaggtggatggatggatagatggatggatggacggacgatgggtggctggatggatgaatgggtggttggacgtataggtgggtggatgggtaggtaagtggactgataggcagaatctaagtttatccttctagtatccctgtaagaaaagtggcatcttaaacagccgtggtacatccgagacttgaaccagatctctgaggcccaaagtccacattcactccgtactctatgcatcctctctgagtggtaatgcagaatgaataaatataacattctatagagacctgaaagcaacaagtgcaagagaggcttcacacagagtcagccatccagccatagagccattctgggaaaccatttttaaaaacatatactgacaagtttaccctactgtgcacacagattaaataataataataataaactgcttttgacaggtatctttctaaaatgtatcatatccctgtcttcttaagtagaacacaccactcatgatgacatctctcgctgatgaatcaggtgatgataatacatatgttgctgcactgtgctgctttcaggagccgtgaatggtgagcagggctgttcacatcttcacaatgtaagcacaaaaggttgtgcttgttctgtttctcagatctgcatttaatgagtctatttcaacccatactgcttgctattatgtgctatttctttaaatgtgtcaatcttcctcctaatttcctgctcataatctacagggacctagacaccagtatcacagttttgtggcactctaagttagaacaaatccgctgtaggtgagagcctgtcatttttgctaatttccatttattggctgtactctacctcagttagattgccagataattgaattttgaataggcaagatagtattgtattcttgcctgatattttgtaaaataagttttatttaagtataatgtacatatagaaaaatgcacgaatcataggtctatagtgcaatgatttccagcaaacagagcacgcccttgttaggtgtacccagaaaacaaacaagccaacacagtattacgtgttttatccttttcaaagtattctcatatgcgccacttcactacagtcattgcaacactcttatgaggctaagcggttgggtattacctgcaattcaacaaatgtggaaaatgaagtttggtatttagcttcactgatttctgaaatcagaaggagcacagcaaggatctaatcctagcgttccattgcgggaatcgtcccttatgctatcaaatttactcagaagatatgatatggtagcttcacttctattatcaaattgtggacaagagtagagcgaatattctgttggcaccacagataccagtggttgtctgcagcctgcgtcggctgtggctgtccactgtccccgccatgcagattgttagccatttttaatttattccctgggaagtcaaatgtcaacacagtcccttgaggagaggaaggtggcataaatcaccacaattataccaagctttccaaaggaaagtgatggttcaaagcctagatgccttcacattgtcatttcttccattctcttcttcccaacatttcatccttaaagccaacaaaattaatttagctgaaatgagaggtctgaagatcatcaaaacttttaataagcataccaaaacttatatttgaatcagctatccttatcactgtttcaaattaccatccattccagaaatcctcaaatggcttgaaccgcacatataaacaaaaaatccctattagaaaaatatggaacttctaaagctgtgcggattaaaggtcactaagggtctcccatgcagctacaggaatatcctcttaagagcacgtcttagcaaataaaatacaaagtgagtgtaaggagttcttaagttcttcttcagaaaacacaagaagtaaaattgttcaggcgtgatcattttttactttttattttattttatttttttgagatggagtttcactcttgttgcccaggctagagtgcaatggcacaatctctgttcactgcaacttccgcctcccgggttcaagcgattctcctgcctcaggcttccaagtagttgggattacagctgtgggccaccacatccagctaattttttgtatttttagtagagacggggtttcaccatgttggccagctggtctcgaactcctgacctcaggcgatccacccacctcggcctcccaaagtgctgggattacaggcttgagccatcgcgcccagccgtgaacactttttaaaggttctgcaggattcaaacttcccaaatgctgcaggtgttgacagcaaggaagcagggcgagctctggaggccagctctgggaattcaaccgggctcacacctacagtccctgggaacaatctgcagccccagtttctcctctgtaaggcgagttgaccacggcgccacagcacaaggctgcactaggattcaattaacccagtgctcacaacctgtttggtccagagaaagtcgtttttattgctaggaaggaaagagcctcttctcgaaggcagaattcctccagtttatatcaatcacctacgaagtgagcttattcaatttactgactcaaactcaattcatattactaagtgcttaactaactaattctcaaactacaaaccgtaaaagcactactgggggcgggtgggggaggcagggcaggggtgagcctccccaaaaggagctaagcaaaattagagcttttcttaaccacctggttaaaacgaaaatattgatcttggcagacatgttaagtgcacgtttcgttccccgccccttctcccaaaagtgcctccaaataaaaaactagtttcttcagagaaccaagcatctaatcatcactcagaggtctgaacatccagcatcctaagaacaaagtgtccacaggttcccaccagaacaaaccagttcaatgcattgctcggaggaaaaagcaagttaactcaagcacacaattacctgtagttgcatattatacgtaagtgtactctttcctgctcacgcctggctacctgcctactctaacacaacaacttccgtttttaaagtgtcaacttgtttacttggaggagccgccgcctgccggacacagcacgtttgggagcctctctttccactgtaggctcgtaactgcagactactcccgaacaacaagaccacggcggctgctccatcattttgccagcttctatgtttccatattttaacaatgttgggaaaactaaatcacatgttaagaccaagcaattgatcagttcgttgcagaggctgcttgaggaactttctgcagcctggacctgaggcttctcaatctaataaacctcagacaggacaaccagacgggggtgtccccataggaaagagaacccgactctggtggagtgtcccacctcttaggggctgtgactccgcgccttatgaaaaggcactttcaacgggcaggctggagaagagtcctctctaacaggaaaaataactccaagtccgcagtgtttaggaaaaagaaccaagtgcttggggaaggctggctgcccgcggagaggcgctgcgtccggagcgctggcccaggggaggcggcgcgggccctacctgcgttcctgagcttcttgttccgatacaccgacaggatgaccaggaggttgcccaggatgtccaccacgatggtgaagatgaggacgcaggccagggcggacgccagccacgagggccgcgcgccgtccccgcggagcacgggctgggaggcgttgggcagcgcgctgccgttgccctgcatggtccctgtgcgcgtcccggccgcggggccatcgcccgcctcgtccgcccgcccgaccacttgttaaggctccgcccggcgctccccgcgcccacgccccatcccgcgcgctcctccacgccgcgcccccggacgcccacgccgcgccggacgccacggccaggtgacacctggtgtccgccgcgagcccgcttggattccccgcccgcagctcgaaccccgcaccacgggccgacagcgccccggtgcgggaagccgggcccagccgccgcgccctggggacggtgtcccagaggcctctcctcgtgggcgcacggcgaggccgttcattgtgtttcctctctgggatgggacttttcacccagcagggccaggctgcctgggatcaaatgcgaaatgggattggggcgagttcaccagctgtgtgccccaccgcccttatcttccttatctgcaaaatgggaataagatactatctcacctgttagcctcataattagtaaaatgtgaaaaaaccaaggactgtcttccgttgtgtattgcaccgcttaagatggtgctagatgtttccgataatgaaatgacattttcaaagaaaaaagtaaaactcaatatttgcagatgataaaaatgtatgtacttctgtaagtaccagtaaaaatgagaaagaaagcacacttaggtggatcggatacatggcagcaatgtaaaagtgctaggaaatggcctaaccagttgtgtgcagtgaggaaaaaactttatgaaaaccatgaaaggaaatttaaataaacggagagacaaacagtgttcctagcttcgaagcctgaaattttcattttcctcatatactttatgccagaccaagaaaaatatcaaataacctaaagtttctttgaaagagtaaaaagaaagtgtaggaaaaggatttgaataagatgaataggagagaagtatgacctaccagtatcaaaatgttcattaaaaattacaattaagtggcgcctgggattacaggcacggtggctcacgcctgcaatcccagcactttgggaggccgaggtgggcggattacctgaggtcaggagttcaagaccagcctagccaacatggtgaaaccccgtctctactaaaaatacaaaaattagccgggcgtggtggcacaggcctataatcccagctattcgggaggctgaggcaggagaattgcttgagcccgggaggcggagattgcagtgagccgagatcgtgccactgcactccagtctggcagacagagcaagactctgtctcaaaaaaaaaaaaaaaaaaattacaataagtatgccaggcacggctgctcacacctgtaaccccagcactttggaaggctgaggcaggtggatcacctgaggtcaggagtttgaggctggcctggccaacatggtgaaacctcgtctctactaaaaacacaaaaattagccaagtattgtggtgggcgcctgtaatctcaggagcctgaggcaggagaatcgcttgaacccgggaggcagagattgtagtgagctgagatcacgccactgcgctccagcctgggccaaaaagaatgagactccgtttcaaaaaaaaaaaaaaaactaaaacagtattgagctcataaacaatttgaaaaagcatataaaataaagattttataaagtgaacagttcaaatcagtagggctgggatagatcacgaaaacaaaaatgcatttaaagaaaatgtaggtaaatatacatatcacttgaggtagagaagcactctgtaagcctggaaaaaagacagacaggaaataatcctaaccatagaaaaggtagcagctgccatggacagcgtgtgtcacttcccatctctggcatcggtatcttacaaccattgtttgcacaatgtgttaacaattccagaaggtctggcactgctgcgaccattttatggacgagaaacctctggtgctgagaggttaagcaatgtaccaaagtcacacagctggtaacaagtagaggcaggattggaactcaggtctctctgactgccaagcaaggagcctcattactaagtgatagtgtttctcggtcgtgatagatttgactacggaaaagttaaaagtcctatattcaaaaaataccacacacaagtgaaagctagagaaactggggaaatgatttgtgacatagctaagagacgaagcattaatggtcttcattattgttatggtttcagcatgtccccagaatttgtgtgtggaaaatttggtccccaggggaaggcggggccttcaagaggcgatcaggtcaagagggttataccactctgtctgactgggttaattctgcaggcatgagtcagttcttgctctcctgggactggattagttacagtgagagtgggttttaaaaaattaccactccagcctgggagacagagagagactctgcttcagaaaaaaaaaaaaaaaattatccagtcccaggtattgctgtattctgtaatagtgatggaaaacagactaagacaattatataaagagctaaggaaaaaaaatagaaatatatttaaaggtcataattagacaaaaactaaaaatgtatgtgtaacctcttttagcaaaaaagttaaaaaaaagagaaagcttccattccagcgatcactttagaaaacattatattggtagtgccaagtgtggtttgaaacacgtggagaaaaagcattcctgtgcaccagatatggacgtcttcaaactgcatacatggtgctagtcgttttactaatagaaaacaattgaacagtgtccacatgtgtcaggacacaccgttatttctccctgcattgtttgtcacaggtaaaactcctatacttggggttttgatacacaaatttgtgaaatcaacagatgaaatacaaaggcatagatggctaactctcccccaaaaggggtggcatacataatgctggggtgcacataacaacattcatgatctttcttccctggggaatgagaaaggtgaagctgggaaaccacgagcactgaaaatgatggtgaaatcctggaaaacaaagacccagagagggaatgcccagactctgactgccagcatccctgaacccagcacgtgaggaatagacccaaaggaagcaactggagcaaaaggcctgaactgaggctggagctgccacacaagaaaacagttccagttccagcctagccaagaacactgcctactgagacaaagaaaactcaacagagaaaaataatagcatctagaatacccacagtgtaagattcgtatgtccatggtacattcaaaattatttaacgtatgaaaacattgtctgtctatctatctatctatctatctatctatctatctatctatctatctacctatctatctatcatctatctaaacacattctttaagatacaataagatcaatcaaatccagtccctaaatgagcaaaatgttgtaactaacaatctcagcaaagaaataggaactcccatgaaagaaataaaaacagtaaaaaagaacgaaggggaaattctagaactgaaaaatacaatttctgaaattaattctttactcaatggacttactagccaaatggacatgacagagtaagtatacttaaagataaaccaacagaaattgtccaacacagagaaaagatatattttaaaatgaacaaagcttacaattcttatagattatattaattagaatactagctgtagaaataaaatggtgcagaaaaaatattagaagacatcatgattgaaattttcctgaattttaggaaagacgtaaatttgtacatgcaaaatgaatactaagcagaataaacaaaaacaagcatactaaggcacagcatagtcaaactgctaaaagccaaagataaaaagcaattaaagtcaagttacatattacgtactggttagcaattaatccaactaacagctgatttctcatcagaaactgtgctaattttctattactgtcataacaaattaccttaattaaattaatttggagacttaaaacaacatccatgtattatgtcacagttaaacagaccagaagtccaggtacaaagtggctcagctgagccctctgcttagggtcttatgaggataaaaccacaaagaagtagagctgtttctttctggaggttctcagggtaaatccacttctgagctcattcaagttgctggcagaatccagtttcatatggttgtaaggttgaggtcattctcagcttctagaggttggctgcattccttgactcatggtcccttctctcatctttgaagccaacaatggtgggcagagtcccactcacacttcaaatttctctaactttatcttctgctttatctcctctgctgttagctggagaaagttctctattttaagggcatgtggatttagactgggcccaactagacaacccaggctaatttttctatctgaaagtccatagccttaattatatctgaaagtcccttttgccattggtcttacccctcattgtgttgctataacagaagaccacagactgggtaatttacaaagaaaaggaatgtatttcttacagctctggaggctgggcaatccaagatcaaggggctgcaccttgtgaaagccttctcgttgtgtaatcccatggtggatgaaatacccaagaccgagtaatttataaggaaaagaggttgaattggctcacggtttcacaggctgtacaggaggcatggctgcttctgctcgacttctaggtaagtcttgggagacttacaatcagggtggaaagcgaaaggaagcaggaatatcttacatggccagagcaagaggaagagagagaggagggaggtgctacacacttataaacaaccagatcttgtgacaactctatcacaataacaaaaccaaagggagaaatccacctccatgatccaatgacctccctccaagaccacctccaacactggggattacaattcgacatgaaatttgggcagcgacacaaaagccaaccatatgaaagacacataaagcaaacagtaagcacaaaaaggccagagtggctatatcagtatcagatttaaaatggatcttgatgtaaaatagattttaaatcaaaatgtattaccagagataaagagagacacatcataacgatgaaagggtcaattcaacaggaaacaacaataattttaaaaattgtatgtactcaacaacatagctttcaaatacataaagcaaagatggccagaatataaggtagaaatagacaatttcacaatcataaatggaaattataacatccctgccctagcaatgatagaaaactagacaaaaagtcagtagacatagaagatctgagcaatgctatcaacaagcgtgacttttcaattgtacatggaatatttaccaggaagaaacatatgccgggctataaaaaaaaaatgcctcaataaaaatttttaaatgggccagatatgttggttcatgcccataagcccagtactttgggaggccaatgttagaggattgcttgaggctaggagtttaagagcagcctgggcaacatgacatagtgagaccctgtctctacaaaaaataaaaataaaaaattttcaatagaaatcaggctagacacggtggatcatatctgtaattccaacaccttgagaggccaaggtgggaggattgcttgagcccaggggttcaagattagcctgggcaacatagggagacccatccccgtctctacaaaaaaaatttaaaaattagccaggcagtgtgttttgcacctgtagtcctgggtactcaggaggttgagggaggattgcttgagcccaggaggttgaggctgtgtgagctaggattgcaccactgcactccagcctgggtgacagagtgagaccctgtctgaagaaaaaagaaaagaaaagaaaagaaaagaaagaaattataatagagaatatagtctctgactacatggaattaaattagaaataataaagatgtgataaccagaaaaatccaaaccatttggaaattaaacaacacacttctaaataattgttgtgtcagagaataaatgcaacagatattagaaaatatcttgataatattctgttattgaaatgataatgatagtaatcatggaacgataatgaaaatgccgcatgtccaactgtgcaggatgcaatctctctctctctctctccctccctctccatgtttgtgcccacagtgtggctgaggggctgatgctggcagaacgagtgttaagaggtcatacagaagtggcctttaaaatttgctttagggggtaaaaataatggagagtctgttggatttttcttggtttttaaatttgcagccaaaactgtaagacaagagatcatatttaacatccccgaggaacatgatctaggaagtacattattatctgtaattaattagagatcattttgtcactgtaaggaatctataagagcatgagttaattatttcaccaaaatgttctgcttcccagggagttggtaatggttggctaacctggaacaaccctgtttatgcttcagcccaggtttcctatccccttggcctgatgtgtaatacctattatccttggttctttgcacttccaaataacttctttttaaattcagcctgtcaagtttcataaaacccccatttggaattttgattgatattgcataacacataaattaatttgacatgttcaaaataatgagttaaaatgtcaattttgaatgtagattcttaattttcttgtaattcttttggtgtttgtttcacataagacaatgttatggagtaaaaataaatttagaattattatgtcttccggtgattttaaacatatcattttgtagcatccctctttatttgtaataagactttttgtcttacagtctattttgtcagaggcataaatgtagctgcatcagtcttcctctttttttttttttttttttttttgagacagagttttgctcttgttgcccaagctggagtacagtggcgccatctcagctcactgcaacctccgcctcttgggttcaaggattctcctgccccagccttctgagtagctgggattacaagctcctgccaccacgcctggctaatttttgtatttttagtagagagtgggtttcaccatgttagccaggctggtctcgaacccctgacctcaggtgatctgcccacctcggcctcccaaagtgctgggattacaggcatgaaccaccacgcccggcctcttccttttgctttatatttgtctgattatctctccttcctactttttattcccaaatgtctgtctctaatgttttgggtgagtttcatgtaaatagcatacagcttctttatctctactttatctgaatatcttttaactagagactttagctcctttacattttttgtgactactaaggtactgaaacttatttctaacatctaattttgggctttttattgatccctttattgtgtttccctcctcctcatccttcatgtttttcttcttaattcattgtttttctgtacatttcacttttccttttacctaaagtatcatcacagtgcatctattgataataaactctttaaaaaatttctatgtgaatgaatacatattgatttcacccatgtttttgaatgacagcttagctgagtatagaattctaaattgctcggtgtggcggctcatgcctgtaataccagcactttgggaggctgaggcgggcagattacttgaggtcaggagttcgagaccagcctggccaacatggtgaaaccccgtctctactaaaaatacaaaaattagctgggcgtgatggtgggggcctgtaatcccaggtactggggaggctgaggcaggagaattgcttgaaccctggaggcggagtttgcagtaaaccaagaccttcccactgtgccccagcctgagcaacagaacgagactccatctcaaaaaaaaaaaaaaaagaattctgagttgacagttactattttctcagcacttacagaatattattggattactccctcagggattctattgctctatggaaaatcagctgacagtctgattgtcatggcttcaaaggtgatccggttttccctcttgttacttgcaagattttttttcttattctttagtgtcctattgtttcacaagcctctaagtgtacattttgtcttttatttatgtgctgcttctacaaaacactccatactatcacctagcagggattatttttatgtaaatgtcttgggttgaaggttcctcagcatgcaaataaaataaatgtggaactcttgccactcagaaattcagagaagacgtttctgagttttttatttacctccgttcaaaactgaaacaagcaaatttccttggctaggcagatttcccccactaaccaagcccccctcaccaggtccattttttcactgtgtgtggctatttgaggatgctggccttgggaacgcggcagagggcgaggacttggttccagctgtctgcatcaccgtggactgactcaccccctagttgcacacgggcactaaaactcaggtcccttgcttcctttgagggacaagctcctcaggcttatcacaggctcagctctcgtatttcaatttattctttgttttaggctcctggaaaatgttctttttattttatttttttttttgaggcggagtctcgctctgccgcccaggctggagtgcagtggcgcgatctcggctctctgcaagctccgcctcccgggttcacgccattctcctgcctcagcctcccgagtagctgggactgcaggtgcccgccaccacgcccggctaaattttttgcatttttagtagagacggggtttcaccgtgttagccaggatggtctcgatctcctgaccttgtgatccacccatctcagcctcccaaagtgctgggattacaggcgtgagccaccgcgcccggccaaaatgttcttactttcttgtgcgtgcaggtgtgcattcctcaccccagtacttccgacaatgttataggatgagaatttgcagtctataaaatccagcttttgctagagacaggattaacattttaaaaacttattataaaactctataatcgtaaatatttgctaacttactaaaatctcactaccctactgtttaagtacttttaatttttttatttttttagagacagggtctcactctatcgcctaggctggagtgcagtggtgggatcacagctcactgcagcctcggactcccaggctcaagcgattctcctgcctcagcctcgcaagtagctgtaagtacctgcttttaatcataaacttcgaaggtgtgaaggtcatactgtctcttgttgctatctttatatagtttctctatctctaaatattgatagtaaatctattaatttatttttacttttcttttcttttttattgagacggagtttctcatcacccaggctggaatgcagtggtgcgatctcagctcacagcaacctccgcctcctgggttcaagcgattctcctgcctcagcctcctgagtagctgagattacaggcgcccaccaccatgcctggctaattttcgtatttttagtagagatggggtttcaccatgttggccaggctggtcttgaactcctgacctcaggcgatccgcccacctctgcctcccaaagtgctaggattacaggcgtacgccactgtgcccggtctactttttttttttcttttcttttctatttttgagacagggtcttgctctgtcactcaggctgaagtgtggtcgtgtaatcacagctcactgcagcctcaacctcctgggctcaagtgatcctcctgcctcagcctcccaagtacctgagggtacacatatgcatcaccatccccagctaatttgtgtatttttttgcagagatagggctttgccatctt

SEQ ID NO: 413 - DNA, 121926 bp, Homo sapiens
agtgaaaagtctaggaaggatcccccgccccaacgccccttggattctccaactactcaactactgaaaactctcttaacagaagacacctctccttccctgcacacaataggagcttaacatatgaaagtgacttcccaatttcagcaaaaaccttcgccgattcagaagaaagctttcccaccagaatcccctctccaacgttctagcttcgacgcttgcagctggtcagagggctcttgccctcctcgggccgggtcgcgggagggaaggtttcggggggcctccttgcccccacccgcggggtgccaggccaagccccgccgagtaactgctccgcctcccagcccggtcccccaggtccctgccccacctgactggtcgccgctgtaatattccgagtccatggcaggcggactctcagcggggagtgtccgcgccccgcgccgcccccgtcacctccttccaggcggtgtgaccccggatggcgcggctaagtgttcagagactgccgcccgaccggagaacttaacgggtgcggagggtaagaaagcggtagcggcaaaggcgaattctttgacctggaagccccggcggaaaaggccgtacccggcaggctggcgggcgggcaggcatgcgagccggcgttctacttcctagaagcaccgctggggccaaaatggcgtctgcccacgaccctcaaaggaatgcagcgcgcaggcgccgcaacccgtcaaccggccaatgagaagacgcaacagcaatgacgccaggcacggccggaaaggagactcctgggaaaattgagctggaactcgggctttagttaaataccttcctcgggtggatcctggtctgacccccgtggtaataacgttatcattgattctttatcatttcctagattctgtgtccgtgccttgtttgaagagcttttgagatactcttccgaaaaatgaagacctgctcaaatgacttttccgtcattcagccaaaccactgtctttcccgtcaggcccagaggcgcctggttcccgcccgcagtaggcaagaaagcgggcgttgctcactgggacttgtagtatgacgcccgcgagctgtgatgcgttactaactggcgcgatccacagcgcctcctctcccggcgtcttcctctctttcattctaaacaacgatttaatttccttgttaagaagccatttagccaacagtaagaagtacacgtctttgcttccagaagggttcccctgatgaaacaccggaggaaggtgaagttgaactttacctgagccctgtgttcctggaaaacagcggtgattaagaaaccccctcatctatttgtgtttctggaacggcacactgtaaagaaccacccgtctccatgtgactcagataaaacgcgtgcagatgacccccttgtttgcctgtgacaaggccagagacctttcccctttattctgagcctgttaataaagccaaacagaccttccaaattcccgctgatgatatcgagtgattagttgagattagaactctcctccccccaacttgttagacacagagaacatttcctgttcacctgactgaaacttctcctgattgcaaaacaatcccaactgtcaatcatcccaccttcctccctataaaagtcaaaactacgctgccaagacactgatcatatctggagtgctctccctattgcaataggctgagtaaaatccatttccttacttgttcattttagtcttggacagagaggggaacattcttgcctttggatcggaggagggccagtagaggtttaagcaaagactccccaggaggtgtagacatgtagaaaaagagccttttgttactactgcagatatctgacccttcgttagccagtcagagtatgctggcagagcccaattataggctcctgaagaggacgtgggaagagaagaaaggggagaagtggtttctctctggaaattcccattttcctgcaagagagttcatggatattcctttccgaagtggtggaaacagcattgaatccaaattccttcttttcagctgtgggaatgacatcttctcaggcagtcttgagaatcaaaagaacaaagaattagcaatgcccgaaaccgaatcacttgatagaagatatcaaggctctaagccctcttctaaagagaaggtgagagtacacctgtgtaaatggagcaggattaatagatcaaaattccaggcggaggttcagtggaagagaaccttttagtttcaccagagatgtaagtccaacagtcaggaaagtggttgggttataaacaatgcaattgccggatgaaaattactgaattttagcgttaaaactaactgtactggtggtttggagaaaggatagaaacactctggacacacaacaatgttcttagctctagaagcctgcaaagaagcatcagatctaatttttgtactcagaaagccaacaatttagtgagacaggacaagtctttcaaatgaatacagagccttagttaaagcagtgtggttgtcagtgtaaacacagcttacggagagttcccagagctccttcctaccagctggctgtccctcctggatcctggtagagaaattctgtagtggcacagatgtgtctttctgagtcttggctgccttacattttcaggactgccatctccttacccatcacaccccaccccagtacagttggcccatggcggtggtagggaggcacccagaagataggctgtttcccacaccaagggtgctaatgacagaagaatggagaggcaaacttgcagcagtccacaatgcttcctcccttaacagataacccagagacgctgcattccctaagtgaatgtaagatttatttggagacactctgaagacactgccatctgctgaacatgtcagggagcaagaggccgcataatataaatagcctggcaccatcagagctgtagactgggggcttagagccctaggctgtgggcctatcgctgggcttattgtacttagtaagctgggacaagctaccagccttctatgagcctcagtttccacatgtatcaaatgagagggttgaatcaggtttcaagtactcttagcttttttctacgtcagagaatccaggtctctaagtctgacccagcttcttgtgcttgagccactagcaagccctaccagggaagacacaaatgaaacttactagctgcgtgaccttgagcaagttgctgaacctctctgtgcttcaacgtcctcatctataagttggggataacagtaccatttatgtcacagagttgtcatgaagctaaatgcacatatataattataatgtataatatgttatatatattacttgtataatattatacatgatataaatatatatattatataatgattcctgggacagaatattgtgaaattaaataattcaaactttttttttttttttgaaatgggatctcgctctgtcacccaggctggagtgcagtggcacaatcttggttcgctgcaaccttcgcctcttgggttcacgcaattctcgtgcttcagcctccctagtagctgggactacaggtgtgcaccaccacgcctggctattttttgtatttttagtagagatggggtttcaccatgttggccaggctggtcttgaactcctggcctcaggtgatccacccacctcggtctcccaaagtgctaggattacagacgtgaaccactgcacccagccaaataattcaaacttaaagctgttggaacttaaattgttctgagtcttgagaggaatgtgactatgcagcctgagtcacatggcatgcagctgcaacttctgccttttttccacctataaataattgagactaagtggtgccagagataaaaccccctcagatcactgccccttctacagagtaataatgtcatcttccttgggatgcagcaatctgtaaccaatcaaatcactgtaacatatgcactgtcttgtatggaaaatgttataatcctgctaaaatttttctgtctgtctctgtataagtaaaaccttaacttcttcactttggaacgctgaacccattcgtttggagttgaggtctcctgggtggctatccgcacactcaaataaactctatgtgtaatcatattttatgcatcttactatttaagattagcaatatatatgttagctattatcattattattaggcattgtgaagatacagaaaattaacacatgattcctaccttgagaagcttacaattcattaggaagtacggctttgaaaaaagaaaatgctaagaggtgaattgtgtgatgtgggtaacaagtaccatgggaattaaaaggagggtgaggctagagtgaacaatcaggttggcttccttgggggagggtgcttgaggtgatatttgaaggacaaaggccgatttggatggaaagataatgtttcaatcatggtaagctaacaatctaccatgtagttatgttgttataacaacatcaacaaatttcagtggcttgacttgataatagtttgtttcttcctcttgtcaatgggcagtggggtcagtggtgaggtggaggttgctctctgctcctagcagtcattcagggatccaggctcttaccatattgtggctccaccatttcccagggcctcagaagcccctactggatgctctgcatgccaccagcagatgggagaagagagtgtgtagaaaggtgcaggatattttagtgggtctagcctggagttagagcatatcacttaccctcattccatggccccttctaattgtgagtgaggcagggaagagtatgtccactgtgggaccaagaggaaaaggaaagtgatcttggtggatatgcagcattccaggcaaggttaagaaatccaccccagtacttcttttcccagaaataaagttctcagcaatgagcctaagagctaggcaaagtatcactatcttccaagagctaggcaaagtattactatcgtcataattagcatcattaacttcatttatttagtttattgagttgacacgtaagcaagttttgcttttccttgtcagtatctcaatctcccccagggcaataagattagtcatcaggatatgccattaaccctggtcatgggacagaggtcccatgtttatggccagtgacctaggtttaaatgctagggcctaagacagatttatccactggattgcccaaagccctctagagaggaggaggtgaccttttcattttgtgcccctactttccccctcttgctgccttggacaaatctctgggtagtttcctcagagggcttatggtgacaaaagcaccaccagaaatgagtcctttcctcctgggctgagactgtggatgcctagctggcccatcaggactttggatccaagaccttcccagtctaggagcagctatcttgaagctgctgttcccggaggatgaagtacttgagtttgcctgatgacacagtcatctccttggcatgtcagaaccaagatcctccaggaagcactcatcttccatgcaccctccctctgagccatatcttcctgccattgaaggagcccaagggtcagggtcacctcttccgggaggacattcgttctggtctttgttggcctcctctttctcccagcctccaatggcacctgggcctgtgaactatatattggttcccaactgggactttgtcccccagagacatttggcaataatatctgaagacattttgatttgtcaccactaggggtggggacataaccaatggctgctgctaaatgttctgcagtacacaggacaacgcctctcattccccaacaaagaacaatctactccaaaacgctaataatgccaagactgagaaaccctgaactacaggacagaatgtgccctgtgatctactgtcttgtactgtgcacaactgtgtttccagggaagcatttaagcgttgcttctcttcccagatattcccttgccccagcatctcagaaaccaaggcaacaaaatgggcaaggcctttcaaaccctgggctagggccagcaagttggggaaacaccttttttttttttaaatctctgaagataggatgtctcatgcatcactggggtgaggaaggaggaggtctggtttgtctgagggttggcgtggtataatacatcccaataagcccaggccatggggtcaggtacaccctaattcaaaccgcacctctgccacttttggttgtgtggcctaagcaagtttcataacctctttgactttaacttccttgctatgaaatgaggagaagcacccctcatttgttgaggtttgatgagggttgagtgagatggtacaagcaaagagcccagcacagagaaaatccttatcacatgccagctctttctgagactgagaattcaaaaatgttctaaagagtagttcagtcgcagaggtctgtgctgccaaccttgctgtttcatagggttaatggataatttggctgctgtagcctagatgggaatattagggccaccataagcaagtgacttcagttagctctatgatatgctggtagagctgaagcgaaaggcttgctctgtgtcagtcgctgtgatgacgctataatgggcttggtcactgacaggaatggaatgaaccataggttgtccatgggcgcatttcagctcagctcacaaacatgtttttcaaggttagctgaatatttgcgtcttgggaaatgagcactacgctaattgtggaagtagcactgggctgggagacagccaagcctggtcgcccgtgttaccaggaagagcctgccctgcctttccccaacccatcttcttgatttccagggcttggggtcccttggctatggaaagcctgaggctccaggagaaccatgcctcagggtgtccccctttgcaccaactcacacagcaatcagaccaggtccttgcaatcataggcgcagttttgactgggagggaggacttggcatgccacttgagaaatattagcaaccaaaaattcatgcccactgttcttccatagtggaagatcttcttccagagatcccactggaatcttccataatgacaaaatgcaaacaacgctgagagcacagatatgttcattgcagtattgtgtgtgacagcaaaggattgggtacctcccagggtccatccagggaggatgggtatacaaatgatggggcacttgtgtgacatactgtcacgctgtttctaaagaccaatggtaaaagtttggtacagtgtcagaaagttcttgtgatataatgtgtaacataaaatagagagagacagagaatagcaggtcagtatctaaaatgtgtttctgtcaaattttgcataaggtgagaactggatgggaacatcttacagattgttttggtccacacagattttctgtcccaatattttcttacatgagggcagtagaaaaggtccgaagaggactcagtctcagccccagagcaaggggttcaccatctctgggagctgccaggagcagcagcgtcagccctagaggagctaaatggtatctttctaaacccgagaaaccatgtgcagcatgaagctcaaaaaggctgagtgtggacccagaaaccgaaccaaattttagggagcaggaggctagtcagagcaagggcagaacttggggggctgttctagggggaacaggcgggacagggggccgcctgaaagactcggaacatgcagctccctccaagtggtccttcaagggatctcccagcttggttccctgtctttgggatgggccatttggttttaagatacagaaactccttcaagccatgtcaacaaagagaacatttaatagacggaaactggggactccatggagcccacccacaggaggcacaggaaaccctgaggcatcgggggtctcctcctgtctctggagccactgggtctccacctctgcagcttgtccacctctccttttctctcccaccaccgcttggtctgtgtccccacgaaaggtccatgttcagggttgccaccctgccttgacctcagttctaaaagacgatggctcattcccacatttctgcctgcagttcccaagtccctccaagtccaaggaaaagaaaggaatctgattggctctagttgggccaactgtaaggatgaccagaccccttttttacccaacacaaggcctgtggctgaccaggtaactacctgcccctattatccacccgccttcaaagccttgcataaatgagctcccctcgccctcctgctcacttccagggactgcctggcccctccagtctgaccccacccagggcccactgcggttgcacttcccttctaaacagtctgtatttgccttaagcccaaatcccccttgatcaagtgccagcccaagcctgcccaatttgttgccaggtaccctcctgggaaccttgttgtctgatggcctttgtctctaaggcttcctgatggccccagacatgtcccaggtgtatgctcctttcacactcaacacagaacactctcttgaccaggtgtccaagcagttctccagcagactccgtctggatgtcctataattcaattcaatcagacactgtcaacctggagtcatagatcccacaggttaagggctcagtcccacaaaactgccccacttcaaatgcagtctcaagtcctaggttgccacctatacttctgaccaattggctataaatcggggttcccatgccccacacctgaggttggatttgctagcatagctcatggaactcaggacggcactcatattgaccagttcgtgggaaaagattttacaaaggattacagatgagcagccgaataaacacgcacaggtgagttgtgtgggaaggtcatggagcttccatgccctctcccgcatgccaccccccagggacctcagatgtgtggaagcttgtcaaatcttgttcaagagttttaccttcccagaggtcagtaggcggggctgaaagttccaaccctctattcactaggtctttctggtgactgaccccatgctgaggctaggtagggcccccacatggtcacctcctcagcataacttcaggtgttatcaaacggactcattatgagatgatcacttgggaaattttttgtttgtttgtttgtttgagacggagtctcgctctgtcacccaggctggagtgcagtggcccgatcttggctcactgcaagctccacctccccggttcacgccattctccttcctcaacctccagctgggactacaggcgcccgccaccacgcccagctaatttttttgtgtgtgtgtttttagtagagatggggtttcaccgtgttagccaggatggtcttgatctcctgaccttgtgatccgcctgcctcggcctcccaaaatgctgggattacaggcgtgagccaccatgcccgacgatcactttggaaattctaagggttttaggagttctgtgacaccaaccgggaacaaggaccaaatatactgtattttatattatactaccaccctcaattagagcttggggtgcttgggggcagagctcctgccatgcagcacctgggaagatgctgagcccccggatggtcagctgactgtcaccatgggatctggctggtggccagagcaggtgcacagactgcaaaccctggtggcctccgggcagcatgcatcgctgctctgcagaaggggcctgggttaaagagcaggtatcatgaggctctgccagctggggctgagggaggcgtgtgggagtggaagtgcctggagcccagggacaaagtcctgtaataaattacgtgggcccagagtgctcccagtcatttcctcttggagccctacctcttcttcctctgtcccttactccctgacacacccggagtcccaacattgcctcctttcctggctctttcagggtgcccagggtggaggggaaggggagtcagccagacccccatcctgacaaggtaagggcgtgccgggggcgtgtctgccagcggggagtagggggtcacctctctgaagagggtcgctgggcaggaggcaggtcccctggaaataagatggaacaggtctgagggatagagagtggagaagcccttcaggagcctggaaaccagaaaccgcagcaggggactcagtccatcgggctgaagggcagcacctggggggctgaggaggaggaggagggggagaagctgtctagccctctgctgtagaagggcaaactccctgcaggaggggaacggcaggtgccaaggctgctcccaccctgaagcctcctcacagctagagggcctcactgtggaatcatgggacatcatggatagcctgggtcccatgatgagcccctgccagatgtcagctgtgccgtgtgtgacatcccactgcgtcctcgcaacacagtggtggaattgcctccattttatggacacagagactgaggaccatggaagcgaaggtgcccacgggaagaagcagagccggattcgactccaaagcccaggcttatccgccttacccatgtaccttgggcaattggctttagtcacctctggaaggctgggaccctagggagaggcaggacaggtctggggtgtggtgggggggggggtgggggaagaggtggctgaggagagggaccgcaccggggctcacatgggctgtcccccttgagctgtccaggtggtgtgtgtcccatccccatttcacagaggacgaaacttgagacacagagattgtgagagctggcccaggtcagacagctggtgggtgtggggcccccaacccagatcccccaaattctccatgacgaggcctccccttcaggctccactttgtaaccctggacttgaattttgctctaatttatcagaaccctgcactttgtttaggattttagttcagagattcacacacaccctcagtgaatcattgttaggaaccactcagctcatcagcccaccccatctccctggacctgctgggggccctacgtctgtcctcagatgccacctctaagagaatcctccccaggcggctgtcttggggcctgctgcatccacagctctagcacggggctctgtggagaggcggcaccacagggatgacctatatgtgttgatattgcttcctgttttacatatgtcaaaagacaaaattataaaaaatttatcttaaagatcttaattggcttttatttgcaattctagaattgggcaacaccccacttatagaatacaatgaatgatctgatgagccgagcagaggagtttggctttatagacagaatggggctgagagaaacagaaaacaaaaggggattagtcatttcaatttattttccttgtaaaggatagagctgagggaacttccttatcatgcccgctgaaactggcctgtctggggctccagctattgtctctctcctgattcttggaaggtcagataaccttcgtttgggcctggtggtgtggaacttcagcatgagtgactccattttggtctggtctgttggccttgtgtaggagctcagacaaaaccaatggcctccatacattttacttaacacatgtatttaaatgatgtttgtgtgcccattcttggtccacataccaagctgttcagggaggaagagccagaatcttagcacatttttcacagaagagatgaagaagggtaaaggagactgggcatggtggtggctcatgcctgtaatcccagcactttgggaggccgaggtgggaggattgcttgagcccacaacatggggagactccatctctatagaagaataagaagaaggaataggaggaggaggaagaagaagaggaggaggaggagggggaggagaaggagaaggaggaggaggagaaggaaggatttgaccaaggccactggactatgagctcctcgagagcctgggctgggtttctctggggtttttccatctcctgcacatgcccaggcctcagcagagaatggacacttggcacatgctgaatgaatgaatggagtagctagcggcagaagacgagctcaggatgaagtcaagttttcaaatccagtgtcattgtagactctgttgtctgcctttccagcagtgtgtagtgtgttccttcactgccagctggggaggcgaggctgcgaaggaaaagtgacccatgtacaccagaggcacagacctccggcattgagtggtcagaggaggcggtcctggggctgaggacaggtaggggtgggaagggatgcagcaggctgtgaggggaggatggtgtgaggatgagggtggggaacgggggatgttccaggtggaggaagtggtagctgcaaagatacagagcaaaggaagtaccagtaaggcttgggcactgttggcgcctggcagggatgaaatacggttgaggggggtggtaagatatgctctagaacgttccatgatgatagaaatgttctcttctgcactgtccaaaacagtagccactagccacaagtggctgttgagcacttgaagtgtggctagtgcaactgagggtctgaatttttaattcagctcatttaaatttaaatagccacatgtggctagtggctaccatatcggacagtgcaacctagagggtcttgctcatcaggttaagagagaggtgaagtggaataagcaaacgctttggagccaaacatttgcagattcaaatcttgtttctttctttttttttttttgagatggagtctggctctgttgcccaggctggagggcaatggcatgatctcggctcactgcaacctccacctcccaggttcaagcaattcttccccctcagcctcccgagtagctgggattacaggcgcacaccaccacgcccggctaatttttgtatttttgtagagatggggtttcaccatgttgaccaggctggtcttgaaatcctgacctcatgtgattcaccttcctcagcctcccaaagtgctgggattacaggcgtgagccactgcaccaggctctgcagaaatcttgagtcaagaaatcttgactcagtcacctaccaaatgtggggccttaagcctcagttccctcttctatcaaatggagtagcatcacttaccttgcagggttgttttacagatcaaactaatgagcaggtgctggaaaactttcagcacagtgtctgtctgagctcctactctgttctgggggctgggggcagagtactgagggtatgaaaaggaaccacagggcagtggttcatgcacaagtatatgtatctgtcaatttctctttcatcccttgcctgccttattcaaatactaaacaaaacagagtgatatgaggcagcttacagtatacctataatacaacagaatcaaaaataaaataagctgggacgtaggataaatgaaggtaggaaaatacactgcagctgggaaaatgttagtaaacaaaatgtacatcagaaaatcccatatatttgctaggcatagacacaaaatttgttctgaacttccagatagtcacgcacaaaactatgcagtaaagattaataatgttctcaagttaggcaaaagccagtttccaaggggaagaccagctttcctgttgcaatgtcatgaaggggataaaaagggagaaaacgacattggctataacaggaaattcaggagagtttttaaagagctatttgtagaaaaggaaggaagatttctcagggactatctctacatgagggagggcacctcacgggctatctcagcatgaagggggcttctcaaggactatcataaaaaggaatgaataaggacttccttgagggctatttcttttaaaaaaaaaaactccatagtttttaaggtacaggtgttttttggttacatggataagttcttcagtggtgatttgtgagatttttttgcacctatcaccacagcagtgtacactgcacccaatgtgtagtcttttgttgctcacccagctccagccttcccccgaaagtccccaaagtccattgtatcgttcttacgcctttgcagcctcatagcttagctcccatttataagtgagaacatacgatatttggttttccatttctgagttacttcacttagaataatggcctccagctccatccaagtagctgcccaagacattatttcattgccttttatggctgagtagtattccatggtgtacgtataccacattttctttatccactcatgagttgatggacacttaggttggttccatatctttgcaattgtggattgtgctcttataaacatgcacgtgcaattgtctttttctggttttattttttttttttgagatggagtctcgccctgtcacccaggttggagtgcaatggcgtgatctcggctcactgcaatctccgcctcccggattcaaatgattctcctgtctcagcctcccgagtagctgggattatagatgcccgccaccacacccaactaatttttgtatttttagtagagacagggtttcaccatgttggccaggctggtctcgaactcctgacctcaggtgatccacccgcctcggcctcccagagtgttgggattacaggcgtgagccaccgcgcccagccgcaagtgtctttttcatataatgacttatcttattgctggatctaacggtaggtttaattgtagttctttaaggaatatccctactgttttccatagtggttgtgctagtctacattcccaccagcggtgaaaaagtgttcctcaagggctttttctggaatgaaggggggcatccaatgggcttttgctctatctcatgaagtggggcttctcaagggatagctctagaataaagcaggatttctcaaggaccatcccacaaatgaatgagggttttcaaaggctatctctacagtagaggaaagtttctcatggcctacctctaaaatgagggagggtttttgaaaaggcactgatacagtgaacaggggcttctgtggagctacgtctacatgaaggacggtgtttcaagggctgtctctctaatgaagaataatttctcaagggttatctctgtataggaaagggggtttctcacaggctatctctacagcttaggaagttttctcaggtgctagctctaaaatgatggagggattttcattgttcatatctataatgtgggatatctctctctactgtgaatgacatcatctccaggctatctctccacagtgaaggcagcatctgctgggctgtctccacagtgaagggagcgtctgctgggctgtctccacagtgaagggagcttctctgagccatctccatggtgaaggaggcatctctgtggctgtctccacggtgaagggggcatctccagggctgtctccacagtgatgggggcttctccagggctgtccccacagtgaatgtcatcttcttgatgctgtctccacagtgaaggaggcatctcgagggctgtctctcctatgctgtctccagataggccgacagcatagcataaaagtgcagcttaggatgaactgcctctgaataagtgtaaaccaagcattttagtgcaaagcagtgaacgtcactacaaagtgctgtacaggatccactggtagcagagggtgtcagacttcagttctgattgagaggaatagcatcaatgagtctgaaggaaacagttgaaccaggtctaaaactgcaggctggactagaagctaaataggccgacacttgcccatacctacacgggagccatatggcacctgaacctagttgtgtgtgtcaagtgtgtgtacatggtggggagggataaacttggtcaaatttgctcatcttgtgatgttgcagaggataggcagggtctttgccaaatccccagccccatatttcccctctgatagggagcagagcccttctgggaggagagattctcctagaagaggttcttctccagggcaccctgccttcgctgacttccccaggaggggctgcaccaggctctccaagagcagggtctcttccccggggctgccttgccgtcgctgactgcctcctaaggaagctggatttctctagccaaattgtgtcatgttgtcggatttttggcagtgggttggctggccctgtgcccactgggagaagacaggatggaggactgtaacttctcattcttaccctgggcttgcctgggcagaagaggagggagccctcatggtgatccaggagcactgcatctctaggccagagaacatctcgcagggacatatatctccggcactgtcagtcacatgctattcatgggaagggtatctcttggacattaccctgaatgctgagctgtcctgtgggtgttagactcccttccagaagaggggcatacccttcttcatggggagccctgggctgtggagacaggctggagcagggcaatggagggaacttgaaatctagactcaggaccctttttctctggtgtgcactgacaaccccagcaccactgagagtggggctgccgccactttcagctcttcctgttgctccctggcagctgtgtgggggccctttctgttgggccctcccatggctggctccccactgagcttggcagtgaggctgtgcagatggtcatcactgtctgggcggggatggaagctcagatatcccagacaacccctgttgacagtaaaataagtaacaaatgcatactatggataaggatgaaggggtggccagcccctccacacctgtgggtgcttctcgtcaggtggaatgagagactgagaaaagaaagagacacagagacaaagtatagagaaagaaaagtgggcccaggggaccggtgctcagcatatggaggacccacactggcactggtctctgagttccctcagtatttattgatcattatctctatcaccatctcagagaaggggatgtggcaggacaatagggtaataatggggagaaggtaggcaggaaaacatgtgaacaaagatctctgtgtcataaataagtttaagaaaaggtgctgtgctttaatgtgcacatacacaaacatctcagtgagttaaagtgcagtattgctgctagcatgtctcacctccagccctaaggcggttttctcctatctcagtaaatagaacatacaatcgtgttttacaccaagacattctattcccagggacgagcaggagacagatgccttcctcttatctcaactgcaaagaggcgttcctcttttactaatcctcctcagcacagaccctttacgggtgtcgggctgggggatgatcaggtctttcccttcccacgaggccatatctcaggctatcacatggggagaaatcttggatagtacctggctttcctaggcagaggtctctgctgacttccacagtgtattgtgtccctgggtacttgagattagagaatggtggtgacttttaacaggcatacggccttcaagcactttttttttttaacaaagcacatcctgcacagccgtaaatccattaaaccttgagtcaacacagcacatgtttctgcgagcacagggttggggctagggttacagattaacagcatctcaaggtagaagaatttttcttagtacagaacaaaatggagtctcttatgtctacttctttctacatagacacagtaacagtctgatctctctttcttttccccacaaaggaaaagccagacaggacagaaaggagccatgtgtgaagtaaaagtctcttccctccttccactctccaccccaataaattacagttaacagttcaatataattacctccccagagtatttctctccatcactctctttctctatatatgtatatatatatcctctctctctctgtttctctctctccatatatatatatattttttttttgagaccgagtctcgctgtgtcacccaggctggagtgcagtggcgcgatcttgcctcaccgcaagctccccctgccgggttcacgccattctcctgcctcagcctcccaaatagctgggactacaggcacctgccaccacacccggctcatttttttgtatttttagtagagacagggtttcaccgtgttagccaggatggtctggatctcctgacctcgtgatctgcctgcctctcctgacctcgtgatctgcctgcctcggcctcccaaagtgctgggattacaggctagagccaccccaactggcctttatttttatttataatattttagtgatggagtcttgctctgtcacccaggctgaagtgcagtgatgcaatcatagctcactacagcctcgaactcccagacttaagtgatcctcccacctcagcctctcaagtagctgggaccacaggtgctcaccaccatgtccaactaatatctcctatatttttaaataaaaataacattatactataaaacatatattatttttattacatactcatatatcaacacatatattagattgaatcatttgaaactgccaatatgtgaccttcttcacttagaaaaaggacactttcatatagttcaacctaactacactttttctttttttgagacggagtctcactctgtcacccaggctggagtgcaatggcacgatcttggcttgctgcaacctctgcctcccaggttcaagtgattctcctgcctcagccttccaagtagctgggattacaggggtgtgccaccacgtctggctaatttttttttttttttttttttttgaggtggagtctcgctctttcgcccaggctggagtgcagtggcgctatctcggctcactgcaagctccgcctcctgggtttacgccattctcctgcctcagcctcccgagtagctgggactacaggcgcctgctaccacgcccagctaattttttgtatttttagtagagacggggtttcaccgtattagccaggatggtctcgatctcctgacctcgtgatccacccgcctcggcctcccaaagtactgggattacaggcatgagacaccgcgcccggccacgtctggctaatttttttgtatttttagtagagatggggtttcactgtgttagccaggatggtctcgatctcctgacctcatgatccgcccgcctcgacctcccaaagtgctgggattacaggtgtgagccaccgcacccggccctaaccatgctttttaaagagctgtgtggtattctacccaaaggttgaacctgaatccagcagacctctgttgttggacaattggtggtttgttgagtttttgtttgtttccattttttgctattaccatcaatgcctgtacatctaccttgatgaacttttacaagtatatttgcagggtatgttgctaatagtgggattgtgtagacaaaaggtgtttaaatttttgatagatgttatcaaattgtcttctacaaatggtggcaccagtttaccctttaccacagtgcatgggcaggcagggtcatctgaggccacacacagcagcgggcctcctgggtgggcccactgtgctgcccaggggccccctccttcctcaggctcccatcctgggtgagcagccgcatgctgggatgagatcagacccttcagttgggggacattgggaagttacctagcctcgagcagcctcaactctctgagagacaagtcggggaaaatgaaataacttgggtgaagcacagcccgacagcatagaacgaggctctgctgggagcagttcccctttcttttcctctcctcctgcccagggccttgtctggcctggtggatgggtgcacaggctctgccacagccctgtcaccactaatgccaaggctcagtttttccaaatatggatgagtatgggaaataatcatatgtgcctcacgggcttattgtgcaatggaaggggcattgtatgtggagctgttggcccggtgaacgcccagtaagtgctgctcttgtaatgataccaggacaactcagcctgtgaatccttggaccctggcaggccctctccccaaggctgaccatttatagtgacctttctggggtccaactggggcccactgaccagcctgggctagccccaaattcagggtgtttggcccggatctagactctggtgactttgcctcctttgggtggtggcccttccaacctgtgttcttcttgagtgatggcttccatgccaggtactctcagctctggggagcagggaataggcagtcagctggtggcataggagaacttccaagtcttactcatccctcacccagccccagatgccctttctgcccaaagaacactcagacccctttggagggcaaagctttgtcagtgccccttccgggctggtatcccataggccagagtctcaatgttagctttgcttcttggacccctggttcctgatctgtgaagtgggatgtctccatggacagcacagggttgctgtggggctcaaatgagagaacctgtggaaagtgccctgcacacaacctggcactcagctgcttgcccactccagccctgtcctggtccagcaatgctttgatcttccctgcacctccacctccccacttgcctttcagcatattcttacccactctacccatactccagttcagtggcaccacagaaatgttagtggtgtggcttcagacccacagcagctttgaggagggctttgagaactagcagtttacccttctcttctcaggtgaaggtaaccctcattctggtccctgagattaggtaggacactgatccccgtaagctcagccacactgacctgcctcagggcttaacaaaaggaactggactaagaagtcatcccattcccaaggggcagaaaattttaagcacaccagtgcttcctgtaaggggcaatgcctcacctgctttcctgggtaggtccatccatccatccatccatccatccatccatccatccatcaatccattcatctgtttgttcattcacctattcacccaccaatctatccacccattcacttacccaatccaaccattaatccatccaccatccatctatccacccacccacccattcacccactcattcaaccactaatcgactcatccatccatccatccaccaatctatccatccatcaacccatcagtggatccatccatccacttacacatccatccaactacccatacatccacctattcattcactaatccatccatctattcatccatctacctatccatccaccaacccatccatccatttacctatccacccgtccatcagcccacccttccacctaccgactcatccatccactcatcccattcatctgtccactcatccatccatttactcagcaagcatgtcctgagccctgactagtatgagtaagtcactatccagctctcaaatttctcacaggtgtgggagagacacacactgtaacacataaaaacagggataaatgctgaggttgaaaatcgcagcctctgcatgtgaggatgtctgtgcctgtgtgtgtgtacatgcatgcatgtatggtaacacacgtgcttgtgtgtgtgctccaaattcatatcagatcaagtacagacacactgaggtaaaagagaacatggggtgtttcaggaactgcatgatattcagtgtaccctggggggaagaggtaagatacaaggtgggctgaaaaggtaggcaggctatgatgctgaagatccttgagtgtcataaagatatggcacattcttagctgtgggaggcatgacacggtcaacttttgcatcttctaaagatcacttgattggtgtgatggaggatgattgttctgagagtccagcagcagcaaggccacctgggatgcttccaacctcccaagtgaaggatgacaggagactaaggggtggcaggaaggagagtgcctcaagttttttcttccttttaatgtctttatctcattttggcattagagtaacgctggcctcatagaacgagttagaaagtatttcctctgcttctgtttcctggaagatactatggagaattaggctcatttcttccttaaatgcttggtagaattaccagtgaaaccatccacacctggtgcttccttttttgaaaggttgccaatcattgattcagtttctctaatagatacaggattttcagattatctatttctctttgcttgagttttggtagttttcatttttcaaggaatttgtccatttcatctaagttaccgaatgtgttgttcataatatgtctttactatccttttaatgtccgtgggatcagagtgatgtctcctctttcatttccaatagtagttaatttgtgtcttctctttgcttttcttggttagcctgacagaagtttatcaattttactgatgtttgcaaagaaccagttttttgtttcattgaattttctctttttatttcctgtttccaatgtcattgatttctgttctaatttttattttttattttcttcttactttaggatgatattcttcttctttctctagtttcctaaggtggaagcttagattattgattttagatttttctttttttttttttttgagatggagtctcactctgtcacccaggctggagtgcagtggcggatctcaactcactgccacctctgcctcccaggttcaagcgattctcctgcctcagcctcctgagtagctgggattacaggtgcgtgccaccaagcctagcagctttttctatttttagtagagacggggtttcaccatgttggtcaggctggtctcgaactcctgacctcgtgatccacccgcctcggcctcccaaagtgctggggttacaggcatgagctaccacgcccggcctctagattttttaactatgcattcagcactataaatttcccttcagtacttgtttcattggattccacaaatttcgatgtgatattttcattttcatttaattttacatttttcttcggacttacctgacccatgtgttatttagaaatatgtttcttaatctctaaacattttgggcttttccagttatctttctgttattgatttctagtttaattccattgtggtcagagaacatactttgcgtgtattttgacactttcttggcaggtgcgtacatgttaataattgtcatgtcttctttgataaatttatccctttatcattatgtaatatttctctttattcctcataatattccttgccctgaagtctgctctaaaactagtatagctactccaactctctcttctttctctctttctttcttctttcttccttccttccttcctttctttctttctttctttctctctttctttcttatacaaaacactgatgtatctagctctattttgattagtataagcaacctaatactaacccaaccctttcttttaaccatttctccaacactttacttttaatttatctatgtctttaaaaaataatttcaactggtatttttattagggagtacatgtacaggttcgttacgtggatacattgcgtgatgctgaggtagaaatgatcccgtcacccaggtagtgagcgtggcactcaataggtagtcttcacatttaacataggtttcttgtggacaacatataattgggagcctcaagtttttaaaagacaaaatctccaggtcctagggatcatttggctgtgaagaatagaagactcggtgtttctttcagcaattgttagtttcatttgctgagataaagaatgcaggggcagaagcaggtttggggatcgaggagatgaggtgctatggtcactttgaatttgatgtgcccatggcatatctgagggacatgtccagggagaggggccttggtgggtctggagatcagggtagggatgagagttggagacgctaatttgggactcagcagggctatgatcctggtggccctgagagagtgggcacacataaggggagtgtgcaggctgaaagagaatagaacaagggctggcagatcagtgggaattaagccatccaaatggcttaccccaaataatcaaactgcaaaaaggcagagacaggatttctgtgttttgtctccttccctccacatctgccaattttattctctcagatcagctatttttaagaagctaggaccatagctcctggtacttttggcattgtatttcataattttggcattagagaagaaaaccaaccctcagctcccactcagaacatcccagaaaaagctgtgattggctctggcttggaccacatggccgcttggggtcccaggattcacgagcttctcatcagcaacacaatttgaactaggggagatgttccccataaggatataggaggaaggcatactgggcagacaaaagtcaccagccactcccttggacaccaagaggtcaaggtgagtgaaagggccaggcgcagtggctcatgcctgtaatcccagcactttcagaggacaaggtgggcagctcacttgaggccaggagttcaagaccagcctggccaacatggagaaaccccatctctactaaaaatacaaaaattagccaggcatggtggagcatgcccatagtcacagctattcaggaggctgaggatcccttgaacccgggagacagagttgcagtgggctgggatcacgcaactgcactctagcctgggcaacagattaagactctgtctccaaaaaaaaaaaaagctctaggaggagatttagtggtgccccagaagcagagggaaagtcaggaaagtggagccttgtaggagcaaagtgagatggtcaggaaggcatgaaaggtgagaaggtggaggcagtgttatggggtggctgtttcaggcaacttggctgtggggcaaaacccaaggaggaggagggtatgaaagctggatggggacggtgaggctaagaaaatgcatttttaagatagacaagacctgagcttatcactattcagagggtaaaggaccaggagagtggacgaggatgaagatgtgagggaggataatatactagtcactcattgctgcataacaagttatcccaaactttaacagcttggaataacaagtatttattatctcacacaagttttgggggtcagaaatctaagagcagcttatctgggtggttccggcccagggaccctcatagggtttgtagtagttgcttgggttgccatgaccaaatactgcagactgaggatggggtgggggtggggcttaaacaatggaaaagtatattctccactgttctggaggctagaaatacaatatcagggtgtcagcagggttgggttctaccaggcatctctccttggcttgcagatgtgggcacagccatctgtcctcttgtcatctcttcacacagtcttccctctgcatgtctgcatcctaatctgttgttgactataaaattgtcgtcacaatgttggctgagctatggtgatctgaagccacaactggggctggagggtcccttccaagatcacacagctgttaactggggccctcagttctcacaacacgggcctctccttagggctgtttgagcatcctcacaacctccaggctccccaggctgagagatcttagagagagagcaagcaggaagccacaaaggctctactccattccttctaccttattctatttggcaaaagcaaatcactaagtccacactcgagatggggtgaattagtctctcttttgaagggagatgtgtcaaagaatttggggacatacattaaaccactacagtaattgataaagcaaggccctaaagcagaggcgggagaaggcagggctggaaggattcgtgtgggctgtcagggttccctgcccctgggcagtcatctaagtctgcagagatacagaggagacagggaggggcagcgttggaagctgagtgttgtttctctcttgtttcagtgaaagaggtcaaggtgttctgcggagtgggtggtggaaaggagctttgaaatagggattttggcagaaacagctgactggggcctaaagaaggatctctggacactgctgaaggcctagaggaggtgcaggccatgagaccaccctgcccctgtctgtaagggggtggaatacatccccagccctgctcagctccaaggctgggactttgcaaggagagatcaggaatcagttcaagggaaatcacagtattcgcaggagggtgacggaccacaggggcccacgtcatgtatgcttccttctggttcaagttggcatttggaaaaaaaagtgtgcttcttgtattttcttttctttgggccttttaatttttacttttaattgacgcataataattgtacatatgtgtggggtacagtgagggtgtttcaatatgtattttatttttgtattccatttacaagttttgatctgaccactttcgttccaaaaagatttgaggccgtttccaggctagttggggatggaaatgaagccaggaggtgggctggtagacagaggagacatggaaggacccaggtgtcatgatggaatgagaacaagttgctcatgggacccagctgggtccagggcgtgttgtggtgaggaggggcggtggaggccacagcttctgaagcggagcagttctgggctgtgggaagaccaggcaagccatggagtgggggcccctagggctgggggtcagaggaggagacgtctatggtatgtgacaggccatgtggggaatggcaggaccaacatggggtctcctgtgaggcagatcctggtgtctggagaggaatgatggggcatgcctggaggtcagatgctgcagcggggaggagggcaggaccacgggtgggcctcaaacttccacatggggtggagaatccagaatctggaagcaacaatgggcagccagaggcagggcaattccctctgtgtcttttcccacctgccaccccctgaaagagctgtctgggagccaggattcagttatacaacaggtattctctgcatttttatacaggttcttaaacattcccaaagcagaggatgtggggcaaagaggagggattttggagctggggagaaaattctccttctttgcttactaactgcatagcctctgcaaagtctcagcatttctcagcatttctcagttttctcacctgtaaaacagagacagcagcatttcttctcagagcttcctccgccactgtgcaccctcactcatccatcaaagccgttgtcaaagtcacatcctctccaagggcttcatctgctctttcactggacaagtattgactgatggctatggccttataagatagtttgaattcaggtaatgtgatgcctccatatttgttctttttgtttagtcttgctttggctatgggggatcttttttggttccatatgaattttaggattgttttttctagttctgagaagaatgatggtggtattttgatgggaattggcttgaatttttaaattgcttttggcagtatggtcatttcacaacgttgattctacccatccatgagcatgggatgtgtttccatttgtttgtgttgtctatgatttctctcagcaatgttttatagttttccttgtagagggctttcacttccttggttaggtatatgcttaagtattttatttttttgcagctattgtaaaagaagttgagttcttgatttgattctcagcttggtcacttttggtgtatagcagagctactgatttgtgtacattaattttgtatcccgaaaatttgttgaattcatttatcaattctaggagctttttggaggaatctttagggtttgctagatatacaatcatatcatcagcaaacagcaacagtttgacttcctctttaccgatttggatgcctgttatttctttctcttgtctgattgctctggctagggcttccagtactatgttgaagaggagtggtgagagtgggaatccttgtcttgtttctgttctcagagggaatgctttcaacttttccccaatcagtattatgttggctgtggatttgtcatagatggcttttattgcactgaggtatgtcccttgtatgccgattttgctaagggttttaaccataaaaggatgctagattttgtcaaatgctttttctgcatctattgagatgatcatgtaacttttgtttttaattctatttatgtggtgtatcacatttatttattatttttatttatttatttattttgagacggagtttcattcttgttgcccaggctggagtgcaatggtgcaatctcagctcaccacaacctctgcctcccgggtttaagcgattctcctgcctcagcctcctgagtaactgggattacaggcgtgtgccaccatgtccagctaattttgtatttttagtagagacagggtttctccatgttggtcaggctggtctcaagctcccggcctcaagtgatccacctgcctcagcctcccaaagtactgggattacaggcatgagccactgtgcccggacgtatcacatttattgacttgcgtatgttaaaccatccctgcatccctggtataaaacccacttgatcatggtggattatctttttgagatgctgttggattcagttagctagtattttgttaaggatttttgcatctatgttcatcaaggatattagtctgtagttttcttttttggttatgtccttttctggttttgatattagggtgataatggcttcatagaataagttagggaggattccctctttctctatgttgtggaatagtatcaataggattggttttcttttttgaatgtctggtagaattcagctgtgaatctgtctggttctggacttttttgttgttgctggtaattttttttattaccatgtcagtcttgctgcttattattggtctgttcagggtatctaattcttcctgatttaaattaggagggtgtatttttccaggaattcatccatttcctctaggctttctagtttatgcgtgtaaaggtgttcaagtagccttaaatgatcttttgtctttctgtggtgtcagttgtaatacctcctgtttcatttctaattgattttttttttttttttgagatggagtttcactctcgttgcccaggctggagcacagtggcatgatctcagctcactgcaacctctgcctcccaggttcaagcaattctctgcctcagcctcccaagtagctgggattacaggtgcccaccaccatgcctggctaattttttgtatttttgttagagatggagtttcaccatcttggccaggctggtcttgaacccctgacctcgtgacccactcgccttggcctcccaaagtgctgggattacaggcttgagccaccgtgcctggccgtctaactgatcttattttgatcttctctcttcttggttaatcttgttaatggtctatcaattttatttatcttttcaaaaaaccacctttttgtttcatttatcttttgtgggtttttgttgttgttgttgtttcaatttcatttagttctgctctgatcttggttatttcctttcttctgctgggtttggatttggtttgttcttgtttctctagttccttgagatgtgaccttccttagattgcctatttgtgctctttcagattttttgatgtaggcatttaaggctataaactttcctcttagcattgcctttgctgtatcccagaggttttgacagattgtgtaactattatcgttcagtttgaagcatttttaaatttccatcttgatttcattgttgacccaatgatcattcaggagctagttatttcatttccatgtatttgcatggttttggaggttccttttggagctgacttccaggtttattccactgtggtctgagagagtacttgatataatttcaattttcttaaatttattgagacttgttttgtggcttatcgtatggtctatcttggagaaagttccatgcactgaggaatagaatgtacattctgtggttgtggggtagaatgttctgtaaatatctgttaagtccattcattccagggtatagtttaaatccattgtttttttgttgacttctgtcttgaggacctgcctagtgctgccagtggagtattgaagtccccggctattaattgtgttgctgctatctcatttcttaggtctagtagtaattgttttataaatttggaagctccagtgttaggtgcatgtatatttaggattgtgatattttcctgttggacaaggccttttatgattatataatatccctctttgtcttctttaactgctgttgctttaaagcttgttttgtctgatataagaataactactcctactcacgtttggtgtccatttgcacagaatgtctttttccacccctttaagtttatgtgagtccttttgtgttaggtgattttcttgaaggcagcagatgcttggttggtgaattcttatccattctgccattctgtatcttttaagtggcacatttaggccatttacattcaacattagtattgaaatgtgaggtattattccattcattatgctatttgttgcctgtataccttttaattgcttttttgttttataggtcctatgagattcatgctttaaagaggatctgttttgatgtgtttccaggatttgtttcaagatttagaactccttttagcagttcttgcagtgctggcttggtagtggcaaattctctcagcatttgtttgtctgaaaaagactggatctttctttcatctatgaagcttagttttgctggatacaaaattcttggctgataattgttttgtttaaggaggctgaagatagggtcccaatcccttctagcttatagagtttctgctgagaaatctgctattaatctgataggttttcctttataggttacctggtgcttttgcctcacagctcttaagattctttcctttgtcttgactttagataacctgatgacaatgtgcctaggtgatgatctttatgtgatgaatttcccaggtgttctttcttgtatttggatgtctagatctctagcaaggccaggaaggttttccttgattcttccccaaaaaatgtgttccaaacttttagatttctcatcttcctcaggaatgcaaattattcttaggtttggttgttttacataatcccaaacttcttggaggctttgttcattttttaaaaatcttttttctttgtctttgttgaattgagttaattctgaattgggttgattcagagcttgtcttcaaactctgaagttctttcttctgcttgtttgattctattgctgagactttccagaacattttgcatttctctaagtgtgtcccttgtttcctgaagttgcaattgttttttatttatgctgtctgtttcaatgaagatttctcccctcatttcttgtgtcatttttttgattttcttaaattggactttacgtttctctggtgcctccttgattagcttaataattgaccttctgaattctttttcaagtaagtcagggatttcttcttggtttggacccattgctggtgagctagtgtgattttttgggggttttaaaaaaaccctcattttgtcatattaccagaattgtttttctggttccttctcatttgggtaggctatgtcagagggaagttctgggactcaaggctgccattcagattcttttgtcccacggggtgttcccctgatgtagtactctcccccttttgtggtattggtataaaaataggcatatagaccaatggaacaaaatagagaacccagtaataaacccaattgcttacagccaactgaccttcaacaaagcaaacaaaaacgtaaagtggggaaataacaccctattcaacaaatggtactgggataattgaaaagccacatgtaggagagtgaaactgaatcctcatctctcaccttatataaaaatcaactcaagatggatcaaggacttaaatctaagacctaaaactataaaaattctagactataacatcagaaaatcccttctagacattggcttaggcaaagatttcatgaccaagagcccaaaaaacaaatgcaacaaatacaaagataaataggtgggacttaattaaactaaagagcttttgcacagcaaaatgaacagtcagcagagcaaacagataacccataaagtgggagaaaatcttcacaaactatgcatctgacaaaggactaatatccagaatctacaaggaactcaaacaaattagtaagaaaaaaaaccaaacaatcccatcaaaaagtgggctaaggttatgaatagacaattctcaaaagaagatatataaatggccaacaaacatgaaaaaatgctcaacatcactaatgatcagggaaatagaaatcaaaactgcaatgtgataccaccttactcctacaagaatggccataattaaaaaatcaaaaaataaaagatgttagcatggatgcagtgaaaagggaatgcttctacactgctggtgggaatgtaaactagtacagccactatgcaaaacagtgtggagattccttaaagaactaaaagtagaacttccatttgatgcagcaatcccactactgggtgtctacccaggggaaaagaactcactattcgaaaagatacttgcacgcacatgtttatagcagcatgattcacaattgcaaaaatgtggaaccagcccaaatgcctatcagtgaacaagtggataaagaaattgtgatatctatgtatcatatatatagagatatagacgtatatatatgatatacatatgtatgatggaatactactcagccataaaaaggaatgaattaatggctttcacagcaacctggatgggattgtagactcttattctaagtgaagtaactcgggaatggaaaaccaaacatcgtatgttctcactcataagtgggagctaagctatgaggatgcaaaggtgtaagaatgatacaatggactttggggactcggggaaagggagggaagggggtgaggaatgaaagactacaaattgggttccatgtatatttcgctggtgatgcgtgcaccaaaatcccacaagtcacggctaaagagcttagcaatagacctggtacccaccttgcactgctcagcgcagggaggggaagctgccaacactcagtcagggtaactcggggtttcctcctttaaatgggacaagtgggctcctccccgctcctcctcctgctgggcctggctgcctacttgggcctggctgcctgctccctctagaaccaccaggtgctaaggacaggtttgaaaggaggcagatccgggtttgattcccagctgtgctactaattaactgagtggcatttcctgcattgagtcccatgtctaaagtgagggaacacgcacattctgcagtgctgtgaggcttaaagttgtgtctatagctccagtggctgcttacctgagcacttcccaagatgtgtgacggtgactggttttcatggatatctgaccagttaaaattggggcttctggatgacagggaaccacctactccctgtatcaagcccaggactgggtatgaaatacgtcttcaataaaggtgacataggatgaagaagctgagaacagctcttgcacttgggctaggactgtgactcattcatccatttattcagcattgtttttgagccaggtcccatgccgggcacttagggaagtgttggtgaacaagcccagctcctgtgctccaggggctcctattggggctgtgtatggagctgacgttctgctttctctctccatacaggcttgtggaactgctgactcaggatgtcggggttcaggctggtaagaattgtatgatttgatctaggggttattggtgtaagttactcaaggccaagttgaatcgctcccaaggaaagagaggaaaggcaatgagaccctataggaaaataccagagacaggggagtttaggaaacacgacagattctagcatctaaagaaaacaagtttggccagccactggcctcggcaatacatgtatagttatgtatagttatccctcactttcatgtagggcttaacatgtccctttgtcttgataaagggatttcttttcttttcttttcttttcttttttttttttttcagacagggtctcactctgtcacccaggctggagtccagtggcacgatctcagctcacggtgacctctgcctcctgggttcaagcgatcttccagcctcagtctcccaagtagctgggaccacaggtgcatgccaccacacccagctaatttttgtatttttgtagggagagggttttgccatgttgcccaggctggtctcgaattcctgagctcaaagcaatccactagccttggcctcccaaagtgctgggtgtgagccaccttgcccagccaacaaagggatttcccagttgcctcattgcggcagttgccgggagctcccccagagaaaacagggaactggggaactgtgggcatgggtaggactgaaacccaggtctgaatcacccctttggactctgcatcgtgttcccttcactcaacaaatattcctgtgttccggtggccaagagatggctcctccacaggaagaaagcagaggagttttgcatttactgtcaaatcaacagaccctggggaactgccctgccctgggaggcagggacaggccttgagaagcctggcggcggggagtgcagggtggagagctcagaggctggtgagcccagagagcagaggccccaaaccagcctgtgcatccttccctgccctccacatttccacccttgccccatgccctacagagtccaggagagcaggacagtgctgcgaagtgctctttgataagaaaatgccccgaatgttctcctcctgagtgcaaagccacacaggacatcgttcctggctgctggagcacactgctgcgaggaggaccttcactacgcagcggcccctggtgctgccactaagcctggcagcatctgactcacagaatggacagccaagattggcttcttgttttcagttacagaatagagcttaggctgttttagtttggagaaaggacacacatggtctaaaaggtcaggttgtgagcgcttctggtaactaagttgcaaacatgagagcgtggctccactttggagcatgatgtggttttaagacaaagccaaacatttcacaaaggaatatgccacgggatgcatcaacgccaaatgtccctctgggaatgcgactaactgcaagcagagtttagaaaaacacctcttggggccctattactcacaattacaattgcaggcctgctctgtcttcagagattgtaagtctttgagaggagagtaatttttttttttttagacagagtcttactctgtcacccaggctggagtgcgcaatctcggctcactgcaacctcggcctcccaggttcaagcaatcctcccacctcagcctcctgagtagctgggactacaggcacccaccaccatgcccagttaatttttgtatttttagtagagacagggtttcaccacgttggccaagcttgtctcgaactcctgacctcaggtgatctgcccacccgcctcggcctcccaaagtgcagagtggtcatgtttttaatgaataagtctttcagagggcccatgtggttgttgagccctctgtggtgccctctgtgctggacactatgcggggtccctgccatagggcattccatcttcacagcagccctgtgaagcgggccctttcaacagataagaaagttaaggttcagagcagttaagtgactttcccaaggccgtataactcctgtaatatagagtagagattagaacccagccggactgtctgacttcactggggcttggactgccataacaaggtatcacagactggatggcctaaaccacagacatttgcgttctcacagtcctggaagctggaagtccaaggtcaaggtgcctttagggttggtgtctggtgaagcctctcttcctggctggtagatggctgtcttctcatcttatcttcacatggcctttcttctgtgcttgggggtgaggagagggagaaagaaaaagagagagagagagagaaagggagagagagagagcgtgcatgcatctcactctggtgcctcttccttttttatagacaccagtcctgttggattaggaccacacccttaggaccttatttaaccttaattacctccttgaaggccttatctgcaaatatggtcatgtcaggaattggggcttcactatatgaattctggagggacacaattcagtccatataatgaggtttacttgtatttttgcccatcttctatagcgatcttcttcctaattctaattttattttattttttatttatgtattcttttttgacagagtctctgtcagcaaagctggagtgcagtggcacgatcacaattcactgcaacctccacctctcagattcaagcaattatcctgcatcagcctcctgattagctgggattacaggcgcccaccaccacgcccagctaatttttgtggggttttattgttttttttttttttttttttttttgagacggagtcttgcactgttgcccatgctgttgtgcagtggcatgatctcggtcactgcaacctctgcctcccgggttcaagcaattctcctgcgtcagcctcccatgtagctgggactacaggtgcttgccaccacacccggctaatttttgtatttttagtagagatggggtttcactatgttggccaggctggtcttgaactcctgaccttgtgatctgcccgcctcagcctcccaaagtgctgggattccaggcatgagccaccacacccagccaatttttgcatttttttagtagaggcagggtttctccatgttggccaggctggtctcaaactcctggcctgtcttggcctcccaaagtgctgggattacaggtgtgaaccaccacatccagcccctaattctaattttttaacaaattctatatcattttgctcacttttctccttcctaccttttatgattcttcccatgtttttataatcagggtatgttctcctgctgtttccaattttgctttcattctggtctgcatttctttcatttcctcaattttttcattcggctctgccaactcatgtctcatcctttttctcagttgtcccccatctaattcctgggctcttttgcctctgacctactctttggtcagtttttgtaaattatggtgaaatacttggtcacaacttcctactgctctgtggcagttatttctcttttgctgagtattatttgctcctttcctcctcttgggtttcagtacctccgaacacagaactgtgctggttccttttggattacttctcttcagatggggtgagctttcttggattagaaggaggttcatgaggtgtcaatgccacagtgcaggctagcagaaatctcacatgtgaatttttagtagtggcttctcccacccaatagatctgggtactgcagagcttttcacagggcaagacttctcttttcccaccccacagagagactgcttcctgcaaatatggaagacctgcaaatatggtgtttcctagaaccaagacaggccaggcaagctccgcctgccaccttgtgcccttgctcctactgctgcagcaagacatgctgcttttgcatgccaggatgggctcctgccttggagaagtgaactttgccctctctttctggaacctacagctggggccaccttttcagcttcctcctgcgtcttctagtgctcgtttctgtttctcatcctcctattgcttgtgggtgatttctgagaggatgcaactcttgctaccgtcatcaagcttgagaagcactttctctcttaaccactcagccacaccaccttcctaaatagtagccaagtttctttttcattatgagaggtgctgtggtgagaccagagctcctgttcttgtcagcttattgtcccagacaagacaaagacatggagagaagctgtacaggcgcttggtacctgcccagtgagcagggagaaagagagatgggagaggggaggagaggaaaggagagacaagctccagccaccttgggagctctgggctggaaggcatagccccgaagagaagtaagtatccagcagggaggggaagagagagcggggatcacaccactgtcttctgtctgccctccagggtgaccacgtgtggctggagcctccctccacccacaagaccggcgtggccatcgggggcatcatcaaagaggcaaagccaggcaaagtcttggttgaagatgacgagggcaaggtcagtgttctggggtttcctctgggccctgccctgccctcacatccagggccctggagccctccccgccctgtggagcctctccccaacaccaggggctccaaggccaagtggggacctgggtggcaggacagatcacggtggagtcctgccatggagaacatggcctgtgtgtcctggggaacgtttcaagaaggaagtgggaagtgggaaaggggctctggaagggccagaggggcagaaagccagtttgcaaaatgaaacgggcaagggggaaaggtgggtgaggaaggtgtgtggaggggcaggacggggcaaaatgcacaagtaagaggccagcaagctggagtggcccgggagtgaccagctcgtccaccagaggggtcagggccagctaggtggtgagcagggaagggcttacaatggagtgtccagccggtcacttagctcctcagattgtcctctgtgctcagctgggtgctgcaggcttagcctccaaggagaagtttctaggctgtggcctgtgagttccagatgatggaagtcagtaaaataataacaatatcttctatttgtgtgacactgtagttttttaaaaaagcttttacttgcacagtcttattccaacaacctgcaaggctcccagctgcaacctgaccctaaatctaacttctggctataagctcctttgtccctggtctgaaattcagccctagccccagctacgccctaaccctgggccctagacccatgctgacccagccatagatggaccggatcctgccacaggagtctcttgacccttgtcatagactgaccctggccggaggctggccactgccccaggtcagctgatccatgacccggaaggtcaccttgctgctgagaacttggaggggagggtgtggcaggctggccatggggatggaggccacccctcaggggagtctgcacccattgttccaggaacactggatccgagcagaggactttggtgtcctcagtcccatgcaccccaactcagtccagggtgtggacgacatgatccgcctgggggacctgaacgaggcaggcatggtgcacaacctcctgatccgctaccagcagcacaagatctatgtgagtctccccagccctgtgtccacaggggagcccctcacaggtgccaacctcctggacagggagaagaaaatgatgcacagggggcactgccccccatgccctcactgagggaggtgggcgaggtgcctaacttttcccaatctctgctgcccagtcccaaacaaggagggtgatcccaccctggaggggaggaagccaatgcgtagagtgacagcacagtgcctggcacagtctctgctcagtgagggctgcagatggccatcaggtggccatcatcctctgccctctccttcccaggcatgttgtagagacagagtcactagacagaaagcccctggcctcccaagagtgaggcccgtgacagcccagatcccaaggtcctgattcaccagacgagggggccatggggatggatgtgggccctccgtgcaaacctggcctggatggaggttcactccagcctgaagctctcatcctggttccaatgcagatttttccaggggaggtggtattccaaaaccgacaccagttcggcctaagtaggtgtggcctgcagaagccactgcctgcctgggcctctctggtctggaggggtggctagcttggttctgactggcccttctgggctgctcagaggaaagcagcttgtgcttccaaagggcttttgcctgcactcctcatctggtggcacagcctgaagccagagggcacgtcctctcctttcctaaagtgaaaaccaggacaccatggtcatgtggcttattgtgcaggctctgcctgccgcaccccctgaggggcagtggggctgggtgggggctccagatgggcagctgatccagggcggaggtcccaggggcacacagaatttggggttggggtccgtgaggcccagttgttgaccagcctatatgaaagcccctgcgggatgcaggtgaaaacccatttcatacttagtccatttttatcgagccccttctaaataccaggcagggtacaaaacagttaacatttgatcttcctggaaatatgttccctgggagctcaccttcctggtggatatcccatcttcccagaggagagatctgcgcagctgaatgtctgatctccctggcccagaatcagattctacttccccaccaaagtcagtggccctgataaccccgagggcagagccagagccaaggccaaggccaaggccagggccgagtacctctgccaggggcagagggcactgaccacctgcttccttcccagacatacacaggctccatcctggtggccgtcaacccgttccaggtgctgccgctctacaccctggagcaggtacagctctactacagccgccatatgggcgagctgcccccgcatgtctttgccatcgccaacaactgctacttcagcatgaagaggaacaagagggaccagtgctgcatcatcaggtgaggcagaggggtcaggcaccacctccaggcatctccctgaactgctccccaccagcatgcctgcaagatcaggcgagatgagagctctccctactccatggcacacacccatctccacagcacacaacggccccagttaccctgcaccccgagcagttcccccaaagcttccttccttcagaacctaggctttcatcgtgtcaccagggactggactgcccagcttttaataaaggtttactgagtcaaggaaggaagttgggctgggttcctttagaaatgggccccaggagtcgggcatagtagctcatgcctataatcccagggacttgggaggtcaaaggaggaggattgcttgaggccagaagtttgagaccagcctagacaacatagcaagaccctctctctgtaaaaataaaaaaagaaaaagatatgggacccaggttaggcacttaaagctgcaggagttgaacaggtgagggcccactcaaaaaaaaacacagggcaggcctcaggtgaggacagaggagcagcagctccaggggacagctctcagttcactaggggaccagaaggaaagtgtcccctccagtccaggtcctgactgcttcagagactccctgcctggcctggcctctctaccagtgaccacagaccctgagaacttggaggggagggtgtggcaggctggccacggggatggaagccacccctcaggggagtctgcacccgttgttccaggaacactggatcctagcagagaactttggtgtcctcagccccatgcaccccaactcagtccatggcgtggatgacatgatccacctgggggattcattcattcattcattcattcattcaatcatttgaggttttgtcatgccccaactgagtgcccccaactgtcctaacatggtgaggcagcagctaacaaaagggaccagaatcccttcctcagggagcttatattctagaagcggagacagacaggcaacaaataagtgcgtttttatgtaggtcctaacagctttgaagaaaaacacagcaggggagaggaaagggtgatgtcggcctcttcattagatagggggcaggccaggcacggcctctctgaggagggatgttgaacagagaccagaatgaagtcctaaggcacaggtgatcacatttcatgtcctcagcaaccctctgaaagagatgctcttattcccatgatatggtctcatgttactgctggagagacctacaatcagaggggctgagatcctgttccagtggtacacagcagtgaagtgggaaattcaaacccagggctctggagaagacagcagacaggtactctgggagaaagctggaactcccaacctgcccccagaggcagggcaagaggcccctcagcagagctgggccgcaggctggctggccagggagcttacggtgtggctctacctggaggttggcggggctggcagtgtgaacaaggagaggaaagagccccctgattttggttccttgcagtgagcagaatgtcacttgtcactttgaatcaaattgcattctcctcctgccctttcctcccccagggctgtgggcaagtccccttaagcccctgtctctacaatggcaggttatttgatgagctcgtgtttataaaaacgcctggcgcttgacaggcactcaggggagtccacagctatcactggaggtttgttgatctcactctgctttgctggcatagtgattgtgggtattttgatcataacttttaaaaaaggtaatattttggccgggtgcggtagctcacgcttgtaatcccagcactttgggaggctgaggcaggtggatcacctgaggtcaggagttcaagaccagcctggccaacatggtgaaaccccgtctctactaaaaatataaaaattagccaggcttggtggccgacgcctgtaatctcagctactcaggagggtgaggcaggagaattgctggaactggagtgggcggaggttgcagtgagctgagatcgtgccattgcactccagcccaggccaacaacagcaagactccgtctcaaaaaaaaaaaaagacagtattttcaggccaagcacggtggtttatgcctgtaatcccagcactttgggaggccgaggcgggcagatcatctgaggtcaggagtttgagaccagactggtcaacatggtgaaaccttatctctactaaaaatataaaaattacctgggtgtggtggcagccaccagtaatcccagctactcaggaagctgaggcatgagaatcacttgcacccaggaggtggaggttgcagtgagccgaaatcatgccactgtactccagcctgggtgacagagtgagactccgtctcaaaaaaaaaaaaaaaaaaaaggtaatattttcagatgaagcaacatctgggatttgctttaaaatagtacaggacgggaaacaaaattggccgggagttgaagctggataatgggactgtgggagtctgttttgcaaactccaaagtgcaggaatcctctggggatctggtgaaaatgcagattctgatcaacagagcctgtgtgacctgggcatctgcattccgagcctgctgctggcctgtgggccaccctttcattaggaagacactgagtcatctcactcagtcttctgtacgtcctgggcactgtggtgctgaccctggaatgaatcagatccgagtgtgccaaggaacttgcagccaagcacagaagaaaagacaaacacaataacatgtacaacacaggcagcctgagacccacaggggatttcagggcttcagtgcagtgggatttctgcaggggagaggccatccctgtcagactggctcagaaagcaggactggggtttgcaggagagttgagaggtgttgaaaaaaatagtcgttttgtggcatcatgtccctgcacaccctttttgcagcggcgagtctggggctggcaagacggagaccaccaagctcatcctgcagttcctggccaccatcagtggccagcattcgtggattgagcagcaggtcctggaagccaaccccatcctggagggtaagcatcactctgggacccgcccttctcccccagcccccctggagccttcctgccaggtaggaccatggggagggacaggataggccacaaaccttcagcaactcctccagacccttgggacacaaaacacaagggtggggtgcatggtaggggaaggggggccaggcagcacaaaggggaaagactgaggacttaataaacttccaccaggtgtgttttccacgggattgtaaggaatattctttttaaaaaggcatccaagatcaaatcaatttgggaaatgctagatgcatgtgttcagttgctggaactgaactggaaagcagttgctgggccagagtgaggactgcaagaggtttattgaggggtaaacctgcagaaggcaaagtgggagaaagcaggagtgggcaggatgagccttcaaacttggatgctgctcagacgcttatgaacgggaaaaagagaggaagcagcttgggtcgggagaggctcacgctgtgatccagatctaagtcttggccaacccagcaggcagctctggagcaaactgctccttagaaggctcctggcttcggccccggtgaccccggcctcagtctagtcggggctgcccagaagcccgtggcctcggccccaaggctgtcagctgctggacagcacagtctctctcgtttctttacaactgaagtttgctttacatatagtaaatattcacctttttcaagtacagttttgtgagttttgacaaactcatacaggcctgtggttcccatcatcatcatgaaatagaattttcccttcaccccccagatcttctctcacaccccttcgtagtcaccctgtcttcccaacccctcccctggcaactactgatttgtctttcccccgccccccttcacagttttgtcttttccagaacgtcatagaagtaaaatcacagggtttgtagccttttgtgtctagttaccttggctatttgggattcttccttgttgctgcctgcatcagtgattcattcctttttaatgctgagtagaattccattgcgtgaaggtaccacagcttctccacccgttcaggacatctgggttgtttatcgtttttagctgctaggagtaaaacctctataaatgttcacatacaggtttttgtgtgcacattggtctttcccttggataaatatgcaagagtgaaattgttggctcaaaaggcaagtgagccatttcactttgtcagaaacttccgaaatgttttccaaaatgctcacagcattttgctttcccaccagcagagcaggaacattctggttgtcctgtgtccccaccagcacctggcacagtgaaggacctggtctgccttctgatatgtgtggagcatgcttgtaactcccgtggccctgacgactaaggatgttagcgtccttcctcatgcttacctccgctctgtatatcttctctggtgaagtgtcagttcaaatcttttgcctattctttaatattctttaattggtctatttccttaccagtgagtttttttttttttttttgcttgtttgttttttgtttgtttgttttttatttttttgagacggagtttcgctcttgttgcccaggctggagcacaatggcacgatctcggctcactgcaacctctgcctgttaggttcaagcgattctcctgcctcagcctcccgagtagctggaattataggcatgcaccaccacgcccagttaattttgtatttttagtagagacggggtttctccatgttagtcaggctggtctcaaactcccgacctcaggtgatccacccgcctcggcctcccaaagtgctgggattacaggcgtgagccactgtgcctggccattagtgagttttaagagttcgttctgtgttctggatacaagtcctttataagataggtgttacatcttatattgtgtccgagtttgtggcttgtcttttcattctctagacagggtcttttgcagggcagaagttttaaattttgatgaagttcaatttttccttttatgggtcatgcttttttgtgttgtatctaagaaatctttgcctaacccagagattttctcctatgtttttcctatatgttttgtagttttaggtcttatatttaggttgatgatccagtttatgatttacatttgtgatccgatatttttctatggtgcaaggtacacagcatagaaaaaaagacttttggctgggcatgatggcttatgccagtaatcccagaactttgggaggccaaggcagtcagatcgcttgaggtcaggagttcaagaccagcctggtcaacatggggaaaccccatctctactaaaaatacaaaacttagttgagcatggtggcatgcgcctataatcccatctactcgggatgctgtggcaggagaatcgcttgaacgcaggaggcaaagtttgcagagagccgagatcacaccactgcactccaacctgggcgacagagtgagactgtctcaaaaaaaaaaaaaaagacttttctgtctttccttccttgcttctttctcatcttttctccttccttcctttctttttctccttccttcctttctttttctccttccttcctttctttttctccttccttcctttctttttctccttccttcctttctttttctccttccttcctttctttttctccttctctctttgtttgttttgcatgttgatactctattattccagtcctatttgtcaaaaagactattttttctctgttgacttacctttgcacccctgtctaaaatcaactgaccatccatgtatggggctgtttctggattctctattatcttcaattcccctctctgtctattctttcaccagtgctacactgtcttgatttctataggaagcggtgcaatcagatagcatgtgccctccaattttgttattctttttcaaacttggctattctaggtaatttacctttccatatatagtacattttaagatcagcctgtcagttagtaccaaaaaaaaaaaaactgcctgcatcagattctttcttaaagagacacccaaccagtcgcccccatgatggccacactgggttcaataagttaaacaggtttcgtaatggtggcacttctcagaggctctgctgtgcattgggattcctcgagagagagacagggtgccgtgtttcctaaacctacttccccaaggaacccttttccttcgtttcatgggactatgctggatgctggtattctgaaactgcattctaaccattaatgggccataaaatcagtcttctagaacaaatcaaatatcatagaatagaaacaccccagcacgtcactcttcataagaactagtactgagtattttgttctaactttgtgtgtgcaggtggacatgtgtatatactaggatgtaatgcaaaatatctttcttactgtggatcacatcagaaaacttgcagaaacagctttacaaaaaagactgaccacttccgtgtgccctggcctggacacgctgttggcactccccatgccggcttggcctctccgtatcagcctcagccctgcaacctgagccatctttctaagctgtgaatctgctcccacactctctcagaagctttactgcttcccttattactgcagaatgattgcccaagttctgagcccggcatttaaggctctgtgccacctggccctacctactaactagttctgtctaccttccactgctttcctcctgcatcccacactctgacaagatttctgcgtctgcaagcacactccatgctttttctgacctccgaggttttccctgcatttttgtcttcctcttagcgggcgcttggcttccgtcactgtctggtgcagccgtgcccattcttcaattcgaggcttggccacctcctctgagaagccctcttacatgatcccactcaaattacattttctcctctctgctcccatcatgggcatcgcccgcttaccttcagcctttggaaatgccaagacaatccgcaacgacaactcaagccgctttgggaagtacattgacatctactttaaccccagcggggtgatcgagggcgcgcgcatcgagcaatttctcctggagaagtcccgggtctgccggcaggtgaggcctcccccttcccaggtcgggagttgagggaatgggggaggtttccaagaggggcccctttcccactctcacctctcctcccctcttccccaagggccctcccagaacccacaggcctcactggataatgagggcccttccccagtattccaggacagcaaatgatagaaatttttccattttgagcagggcttggtggcgcacgcctctaatcccagcacttatgggaggccaaagcgggtgggttacttgaggccaggagtttgagatcagcctggccaacatgacaaaaccctgcctctacaaaaaatatgaaaaaaaaaattagctaggcagtggcacacgcctgtaatcccagctacttgggaagctgaggcatgagaattgcttgagcctaggaggcagaggttgcagtgagctgagattgcaccactgcactccagcctgggcaacagagtgaaactctgtctcaaaaaagacttttctccattttgaattttccattcacatacatttcttctttctttggtgcctaccattcctcatccctactagaattaattctgagactaggctagttgggtgggccgtatcttcaggtatgttaggggacatggcagaaagacacagatgacagtatcccaaataccacatggccaggaagtacagtggcatgtggcctgtgttgtcacaccaggccctgtgctcagggggccccatgcttggtttcatgctctgctattgccaccttgaaattcttactagctttttagcaagagggcccatggtttccttttgcactgggcgatcatgtagccagtcccaaatggtaggaatcccaacacatggcacccacaacagcagaattaatgcacctgtgtgtgtgtgtgagtgtaagggggtgctctcgtatgatggcataacacctaacacatgcatgtgtgcaaatgagtgcacacacacagaaggggtccagaggggagaatgccaccaacagaggggctgtggctgtgtgagagggacagatgcctccgcactgtgacaagctgagaaggaaggtcacatttagtgaccctccgacctggtgctatacttttcctgttttatctcatttgaccttcacaaccatgagaggtaggtctctttatccctattgtacagatgagaaaactgagtccagttaagttcggccccttgtccagggtcacagagccagcagatggcagagtctctctgccctgtctggaagctcctatttcttgatatagtggttgctgagttcatagaacttgtcacccaaaatgataccctgaaatgggcaggaaatttctaaagcaggtgagaaacaaggcctgcccaagaaaagagaaagaatttaaaattacggcatatctatactacagaggaggcggtctgtccatgtcaatgtaaaggatcaccaagagatatgtttaggtgaaaaaaaaggaagtagcagaaccacaaatatgttttgtgtaaaaaaaaagaaacaaagaaaagaaaagagataactatttatagatatactataagtaaatgtttttttaaaaacatgtctaggttctggggcggggaggaggggatttaagaaaggggaaggcaggatggaaaggagctctcatttttttgtttttgatcctcccacctcagccttttgagtagctgagactagaggtgtttaccaccacatccagctaattttcttattttttgtagaggtgaggtctcactatattgcccaggctgctctcaaactcctgagctcaagtaatcttcccgcctcagcctcccaaaactgctgggattacagcccaactgagactcccatcttttaacactactgcatatgcttcagattgtttgatttgtatgagaatgcatttataaatagtgttttaaaaaatacagaaggcaccctaggcaacatggcaaaaccccatctctacaaaaaatacaaaacttagccggacgtggtggtgtgtgcctgtgatcttagctacttggtaggctgaggtgggaggatggcttgaatccaggacttcgaggctacagtgggctgagattgcaccactgcactctagcttgggtgacagagcaagaccttctctcggaaaaaaaaaaaatactgaaggcctagggagccccgtggctgtcagatctctcgtgggccactaagtgcctgtgaagactgtgggactataagagagccccgactctgtgccatcactcctggcctggagactttgggcacagcagtgtcagggcttcgaggagcagtcaagatgcagggaaatggagttctcagggcagggatgagacagccgcggaggcccgggacagggacagcaaccaagccaggctggccctgggtcagtgccagagctgctcctggctgagagatgtggagcggaggccagggctgggctgggcagaggcagtctgaggccctgaggcctcaggggaatggctcatgaatctgtctggaatgccctccctccctcccaggctcccgaggagcggaactaccatatcttctactgcatgctcatgggggtgagtgctgaggacaagcagctgctgagcctgggcacgccctccgagtaccactacctgaccatggtgagctgcccacctgccgcctcccagtagccagtggaagggaggaaaaagagcttgtgccgctccaccctccgcgacagctgcagagaagcccaacgctggccgggcccctgaggcggggctggttccctttgcctctcctcgccagcccctctctgctgggaatcaccttgcccgcgtgcctcccgcttccccgtcacatgtaccccatgccccaggctggacccggggcctccccgcagacctcatcttcctttggtccccactggatgacaggctcccggtgcccagtgggccacagggagttgcccacatgcctcctgctcctgatttcactccaattgtctgtccttgcaggccccctaaaacgtaagccccgggccccaggaaagcaaagcccttcctgtgctcccagctgcacccgccacctaggacagggcggcaccacagccatcgctcattagctgaggctccctggccctcaggagaactgcgcctcctggtttattgaccacagagtggacccagagcattctgcctctgggatctctcccatgcaaccctctctcctgggtccactgctccaaggccttcaccagcccctgcctagacttcatgggtcccccatcgccagtcttgacctctaatctgtcatctaccctgcagccaaagcactcttcctgtaggaaggtttgcactgtagtgtcatgctttggatggcactgctgcagtgacccctgcggcttgtagggtagaagtccaaactcctccatgtggtttccaggtccctccaagatctgcccctctgccgacctctcccttctcaacacccaccccagcctccccgcagccctgtccctgcctccccacctcgtggccttgctcccatcatcctctgcctaaactgccctctgtcctcagaggcggtggggccagctctgcacctcctccaagaagcctttctccacctctcgatagggctggccccggcccctgtggtctgggcacctgtaacaggcaaatggccatggcacggtcactggctccctgcctgcccccctggatgcgcagcacagggcctggcccatggcgagccatggaaagtgtttcttaaaggaacaaacccacagtgtcccccagagagacaaggcaagctcgagtagggacgaacgacaaatagaggatcagagaagaagtgtgacttggccaaggtcacacagtggccaaatgctggtgctggtggcaaggcctgatcatgctgtggctactgtgtcatgattctgcctctgaaaagagtttttgagcgtggaccctacgtggtccacccattgcctatgaagtgcagtgtctcagccttgctggtcccaggagggaggtggtggggcaggggatggccccattcactgaggcaccctgtccctcaggggaactgcacttcctgtgaggggctcaacgacgccaaggactacgcccacatccgctcggccatgaagatcctccagttctccgactccgagagctgggacgtcatcaagctgctggctgccattctccacctggggaatgtggggttcatgggtaatgccggttctgccccaactgcacccttggggagggagagggaaggggacaggagcaggaaggcatctctaggggttctcacaggaaggatcctgtggtccaacccaggcctggaaaaatatatctaaaaaattcagctgtgattttggaggcctcgtgaggcaaaggggaaaatgtcaaagcttaaggctctccacaggtggagaccggccaatcatcccccacttttagctgggacccaaaagggcttcccccttaaggttcaggtaagccagagtaaacaaatccacgtgtgaacttgcaaaccaggttgtgagcaaggggtggtctggggattaagttgtcctgacctgtgaacacccccaagcacctaacggcagttattgacagtcctcgctggaaaaaagcaccagcaagttagattacaaatgattcctgtgagtagtttttcaaacacaacatccagcatgaagccaggaagaaataggaacaaggaaatgagataccatgaacaagaaccggcagaaataataaacagtagaaatcgatccacaaagatttcaaagttggaattattagacacagactagagaagttctgcttattttgctcaagaaaagaagcagccaagcttgaaaatttagacagcgaatgggaaactttaaagacattatagatttataaacaaaccacatagaaattccattctaaaattaaaaaaaaaaataaccaaaaggaagaacccaatggatggtttaagggattctgtgcctgtctaggagatggaatgtgtgagctggagggaaagtcaggagaaactgagtacagcatggagagaggaatggcgggagatgtcagagagaaggtggagactgggaggacaccgtggcagagggagcacacctttcattggagtcctaaaggaaaggagagagaaaggggcagaggcaatatttgaagagatagggctggttccagaactaaggagagaccattctcaaagcaatgggaagggatagacttttcataaactgttctagagcaatggggtgtccatatagaaaacaaaagcttgggccaccatctcacgccatgtgagaatattgcttccaggcaagctgcagctgggctgatctgtcgtctatcagccagactgcacacttcggccagggaaaggtgggtgctaaccagaggtgggcaccggggcctgggacagcatcagaaacatgatgctgaggaagtgaagcaggcacaagagaatgcagacagatccactaacataacatttgtttgtttgtttgtttgtttgtttttgagacagggtcttgctttgttgtccaggctggagtgcagtggtgggatctcgactcactgcaaactccacctcccaggttcaagcgattctcccacctcagcctcctgagtagctgggattacaggggtctgccaccacagcctggctaattttgtatttttagtaaagatggggtttcaccatattggtcaggctggtctcgaactcccaacctcaggtgatccttctgcttcagcctcccaaagtgctgggattacagacacaagccactgcgcctggcccactaacataacatttaaaagccggcacattaaatgctgtttagggactctatgtagggaataaaaagctaggaagttagaagtcgggagggtgcttacctccggaggagagggacacagtctcagcccgcaaggacctcggagggctgtgggtgctggcagatcctagatttggctttagcgtggttacgtggtgctgactttattctttacaacacagctttgtgttttatgcacttctttatctgtatattttatctccaatttttttcagtttaaaaaagaaaaaaagcaaaaacaaagacacccaaaggtcccgtcccccaccagcctggcacgtcctaagctggacgttggttgaagaggaggaactggaagctgggaggccagtcaggagacggttgcaatagagccaggcctggcttacagctggagctccattagtgctttgcttcctgtgactgaataaataacgaaatgtccgggtttccacacccagcagcatggactgaggggcctgatggctcatctctccagtgccagtgtctgctgtgtttcccaagtcagacttctccctccaaataagcccacctttctttaaacttcccttcgacccagggccctggtctcctcaagaggaagtggtctgccacgttcatcaacagctaaggtgtgaatgacccatggtcatggggccgttggctccctcaaagagaggacactgggagagaccgtggcttacgccagggcagctgtcctcctgagtggatctggggctgccaagggcccgggccagtcgggaccttgctcccatcgctccaggctgctttccaactcagcattcctgcttctctctctagcttcggtcttcgagaacctggacgcctcagacgtgatggagacgcccgcctttcccaccgtgatgaagttactggaggtaggggtgctgtgcccacagcttccattttggtggggggcctcagaggcctgggctgacagacccctgacacctgattcttataaccctacccaggcccccacccctttcccagggcctatgctcaaacccctcccttctgtatactgcaggtgcctgagggtgggcgcagagtggggcagtgccaaacagagcggcggaatggccagtttggctttaatgaatgtttcctccctttccctccatttcctcctgcttgtcagtggccctgtttcagtatcctcgccctccaccctgtcaggtccctaggctccccacttggaccccaacccacccatcagactagccctgccctgtgccctcaccccgcagggcttctccggggcttgcactattctgggagagtggaatgtgccagtgagtctggggcccatcccattagccttcccggttgttccccagtccaaatgcagccttggcttaaaggaagggctgcaggccctgagtgaggggctacctctgcaatggggacatggcagcaccccacgtcacccccattgacagttctggtggaaaattaatagaatcaggagcaagaaataaatacataaagcaagcaatcacattaggtaccttttgctattaacattcttcttttggttcgagggtactcagaaactctgggttttgtcagctccagtggagggctggcccagcacactctcttgctcctttagactctcagccttcaggcgggactgatttcagtcaggacatgcctgaggtctggcctcagatccctccctcaccctcattttccaaggccaggctgggggagccagcccctttctcagcccccaggagacccactgagggcttgacccaccgagctggagaatccttccctaacagctcccagggccctggccctggcctcgggcagcgcccaccctccggtgggcataggtgcttggtcacgagagggaacaagacttggcagaagcaggtcagagtgctgggccaggccctgctccacaggtgcgacgcagcccccacctgcctccccaggtgcagcaccaggagctccgggactgtctgatcaagcacaccatcctcatccgaggggaatttgtcaccaggtccctgaacattgcccaggctgctgaccggagggacgcctttgtcaaggtacagagctgagagagcagggcttacatggccatctgttgaccacggctctgcttcttgctgtgccggtggagggcaggatggagcagagggccctgggcaggtccccactctgccagtcacctgcctggtgaccatggactcctcagcctcttgggccctggtttcttgcctttgaaggagggataacatccacagtaggtccaagacattcggcctctccaggtgaacttggaggtaacctccgcctgagcctccaagcccaggattctcccacccccgtgtctctccagggcatctatgggcacctcttcctgtggattgtcaagaagatcaatgccgccatcttcacaccaccagcccaggaccccaaaaatgtgcggagggccatcggcctcctggacatatttggctttgaaaatttcgagaacaataggtatgaagatctcagatcccagccccactgcttccagaaaacagaagataagcagctcctctcgaagggggcaagttggaggggagccgtcaccctgcacccaggcctggcgagtcccaccagatccgtgtgctctgcatggggtggctgctgtcccctgccatctagagaaggctgcacaactaaaagctgtccctgagagccgggctaaggccccggcatttgtcacccttcttgggccacctgctgtcctcatgagccagagtggattatcacacgaggtcagggttgaaacagaaatcaataacatggattcatctgcatctggctggtttatcattttaggtagtgggggaagctagaagcatttgcagaccatccctgattttttagtttgtggggtaaggcacagcaggactcctctgaccgggcatcccagtgttctggcaccccagactagaagctggagagctgtaaccaggaggcaggtcagaaaatagctgcaagctatgactgtgatgaaggctgggggtcggatagacaaaggtggtgaggggaccaggcaacggagccaggccaggccaggtgatgctcaggggcactatcaccagcaagaggagtcccatgacgactggtacaagcaggctgacaacactagctttgcaatttagcttacctgagccagctcactgaaagggcttgatgggacagagaccggaccactggctccaggaagcagagctcctctgggccctgtctgaggagccagggggctagcctgaccttgcatgcccctgcccaaggcctgtctgatctgagagtgatttagaagggccccccttggacagccaggattgtcaagacacaagccattccacacgcaagcacgctgggatctcagccctcccagggccagccgggggtgcagggcaggtgcctgctcactgcagtcaggtgggagaggcagggctggcagaacttagcccaatgcactctctaaggcatagagagctcaagtgtgattccgattattggcgtctggccctgggagggacaggtattggagacagcatgggccagactttggcaactgatgggaactggagaggagggacagagacagaaactcctcggtttctgacttgagccgggggtggtaggtggaggggccatttcccaaggcagggaatgcaggaggaagtgcaggttggagttctgggaacaggggcagtagggcgtatgcctggttgatgcagaggggcccagcagtcaatgctgggtctctggaagcttgtctcaataccaaggctcacgggtagggctgctggtgtgcactcagaccacaagaattgtttcagtgtcaggtgggcaggcctggtagaggacccggcagggggctgtgagaagctgaaggcgaggacttgatgatatgctgagcctcctcgtttctttgtctttttgacgtggggtggagaaggtgacagtgatggaggcagacagaggagagagagtgtgcaggaatgagtgtgcatctctgtgtacacgaggtgtgcatctgtgggcatatctgtatgcagctgtttgcagatggctggtgatcctatggctccagcctgctgcagcggggactcagctggccccactccacccctgggcagtgaccttgcctccacagcttcgagcagctctgcatcaacttcgccaacgagcacctgcagcagttctttgtgcagcacgtgttcaccatggagcaagaggagtaccgctcggagaacatctcctgggactatatccactacaccgacaatcggcccaccctggacctgctggccctcaagcccatgagcatcatctccctcctggacgaagaaagccgcttcccgcaggtgtgtgttcgggcctgccgaccttctggtggaggccctgctatgggtctcctcttggaggctgggaaactccatttgggtgggccacttgttctgagagtcactaaaacctctgccaggaataagcagaagagcctcagtctaaccagacagaccctcctctccaaggcccacttctctgactgctggggtcctcagacagtagttcagagggtggagcagaagagctggtggtggagggcggcagacccggcctctgctcccagctcagccctcactccctgcaacaagtcactgacccctgggcattagtttcctgtctgtacaaaggccctcaatcattctgagcccagatctctttgcctccatgaggaagtccctgagcctcacctccccatggctggactctgggacctcagcccacagggtgtctgggttcttccaggggacagatctcaccatgctgcaaaagctgaacagcgtccatgccaacaacaaggccttcctacagcccaagaacatccacgatgccagatttggcattgcccattttgccggcgaggtgtactaccaagcagaaggtgggtgcagctctcctctcatgtcccttccaaatctggaccgggttccagggagaccgtggaaagcaggctcagaggatgaggctattttgcagctctagcaatggggcagagggatgagtagtatggcttctactggagaaagaaaatggagtggaccgggcatgttttgttttgtttctggtaataactctgttgagacataattcacataccatgttatttacctattttaagtgtacgacttgactgtaatatattcagagtatattaatgattgccacaattttagaactttttcgccacccctaaaagaaacccctcatgagcaaccactcccatttccccccagccctgggcaacaattaatttctgtctctatggatttgcctattctgactttttgcataaatggaaccatataatacgtggtcttctgtggctggtttctttcacttagcatcatgttttcaaggttcatctatgttgtagtacgtgtcagtgctccatgtctttttattgcagaaaaacattccattatctggaatgtttatctcgtcatcagttggcggacatttgggttttttccactttttgcctattatgaataacacagctatgaacacccatgtacaagtgtttgtgtgggcatatgttttcatttcccctgggtatctacctagcagcagaattgctgtgtcatatgataactctatgtttaactgtttgaggaaccaccagactgttttccaaagcggctgtatgattttacattcccactagcaatgtatgaggactccagttcctccacatccttgcctacacatgtgattgtctgtctttgttattatagctaccctagtgggtttgaagtctcaatgtgatttgcatctgcatcccccgatggctaatgatgttgatcgccttttcatatgcttcttggccatttgcacgtcttctttggagggatgtctatttaaatgctctgcctgtgttttcactgggttgtcttttcattgtcgagttgtaagacttctttatatattctggatacaagtacctaataggtgattttaaatttttttctcattctgtggattgtcttttcatctgcttgacggtgtcctttgaggcccaaaaagctttcattttgaagaagtccaacttatctattttcctttctttgcttgtgtcatatctaagagtccagggtcaaatacaaagtcatgaagatttatccctatgttttcttctaagatttttttagtgttagtttttacgttaggtctttgacccattttgagttaattttgggatatgttgagagaggatcggtaatggttttgactgaagaagtgaaggcctggggtggtcaccctatgggtgtgccaagaaaaacgaggaaggtggccgtgggctgctgtggtcaggaaagcagggcggccagagggtcactctctgcccctcatgtggaggaatgaggaggtgttctggtctatttaactggagacaggaatccagggatgattcttttgagtagagggtgatcatttagtcagaacaggctaggctttgggaggccaagggagaaagggaaaggtgccgtggctccttcatagttcctgccacatcctggctttgggctcttggaaaagggagaggctggagccagtcggacctgcagggtcctgggacgcaaagaagataccgagcccatcctccatggggcaattcaaggctgagttttattttttgaaatgataggaaacttacataatgctaagattaaggtcgattctttctagactttctggttgcagaaatattaattaaaactaagccttctttttattttggataccatgctgtgctgatgacctcagctttacttactctgcctgttgggagactgaacccaggagtgtctcaaccctccccacccttaaaacatccagggagctccctgcccctggtggggagctctgcctgagcctcaggggtgcaaggtgtcaccgagtgtccaccccctgcccagcacccagtgcagcccccctggtgctgctcccctcacagacacctgcaggaagaggtgggaaacagactcccttccctctcccactcttgactcttcctccccagatccacagcaggctgtgcaggtgtgcacagagcataccactaaaagctggagtgacttaaggggaggaaagtgaaagaggaaagtcagggtcgtgcccttgggagttcgtccttagagaccaagcagtgcagcccctggcctcatggagcctggctttgaggagcagctcatcttcagtgccttctcagtgtggttctgtccctactgcagggctaggccattcttactcatggccggaggggagacatgggatcttctcacccgctggagccatgcctgtattaggcactagggcagcagtaacaaacaccacagactgagtggcttaaacaacagaaatgattgtctcagagttctagaggctggaagtccaagatcaaggtgctggcaggtttgatcccttctgaggcctctctcctttgtatgcagatggccgtcttctctctgtgtcctcatatggccttccttctctctgtgtgtgtctgtgtcctcatctccccttctttctttctttcttttttttttttttttttgagacagagtctcactgtgtcacccaagctggagtgcaatagtgtgatctcagctcactgcaacctctgcctccgggcttcaagcgattctcctgcctcaggctcctgagtagctgggattacaggcacatgccaccatgcctggctaacttttgtatttttagtagagacagggtttcaccatgttggtcaggctggtctcgaactcctgaccttgtgatccacctgcctcagcctcccaaagtgctgggattacaggtgtgagccaccacacccagcctcatctccccttcttataatgacactagttacactggattagggcccatcctaatgacctcattttactttaatcccctccttaaaggccctatgtccacacacagtcatgttctgatgtatagggtgttaggacaccaacatatgaattttaggggacacattttagcccatgacactgcccctctcctatttctggaggctgcatctgtttttagtctgaaggagccttagccctagtaggatctgcccagaggcaggaggatgtggcagcttatataagggggtttggagtgggaatgggaattagggggggtccagagtttagacaggagaagtgactttgtgctgggtagatggtgggggccatgcctgggtagaggggtggagagcatggccgtagtggggccattgtaggagggggctcctccacgcatcctgtattcccccacactgccctcttcttccccatgggtgggcagtgatggctaagctgggatgctgggtgggccctgtgtctccacaggcttcctggagaagaaccgagacgtgctgagcacagatatcctcaccctggtttactcctccaaaaacaagtttctgagggagatattcaacttggagttagcagagaccaagctgggccatgggaccatccgccaggcaaaggcaggaaaccatctcttcaaggtgggctcccaggcaccctcctgggtctgtcacccctgatggctacagggccagacagacatgtacaggaaagactgttttactcacctctgggtccacagcatgcagttggcacttgggaatcctgcaatggatggatggatgggtgaatggatgggtgggtggatagatgggtgagtgggtggatgggtagtgggtgggtggatgggtgagtggatggatgggtggtgggtgggtggatggatgggtgggtggatggatgggtgggtgagtggatgggtggatgggtgtgtgagggtggatgggtaaatggatgtgtggttggttggttggatggatggatggatgagtggatggatgggtgagtggatggacgggtgaatgggtggttgggtggatagatgggtgagtgggtggatgggtagtggatgggtggatggatgggtgagtgagtggatgggtggtgggtgggtggatggatgggtgggtgagtggatgggtggatgggtatgtaagtggatgggtgaatgggtgtgtcgatggttgggtggatgggtgagtgggtgaatggatagatggatgggtgggtggctgtgtggatgggtgagtggatggacgggtgggtgggtggatgggtgaatggatgggtggatgggtgagtgggtggatggatagatggacgggcaggtggctgtgtgggtgggtgagtggatggatgggtgggtggatgggtgggtgggtggatggatagatggatgggtgggtggctgtgtggatgggtgagtggatggatggatgggtgggtggaatggtgaatgaatgggtgcatgggtgggtgcatgtggcagcttatataagggggtttggagtgggaatgggaatctggggggtccagagtttagataggagaagtgactttgtgctgggtagatggtgggggccacgcctgggtagaggggtggagagcatggccttagtggggccatgggtggatgggtgagtgggtggatgggtggtgagtaggtggatggatgggtgagtgggtggatgggtggtgcgtgggtggatggatgagtgggtgcatgggtgaatggatgggtgaatgggtgggtggatgggtgggtgggtggatgggtgagagggtggatggatagatggatgggcgggtggctatgtgggttggtgagtggatggaaggatggatgggtgggtgggtgggtgaatggatggacgcatgggtgggtgggtggatgggtgctgggtaggtggaaggatgggtgagtgggtggatgggtggtgggcgggtggatgggtgggtgggtggatggataggtgtgtgagtggatgggtgaaggggtgggtggatgggtgagtgggtggatggatacatggatgggtgggtgggtggattcttgaataggtagatgcaccaccccacctgtggggccttggccgcaacccttgctggcctacagggtcagctgtcccaggacatggctcctgagacccacttgtgctctgtgcttccattcacagtctgcagactcaaataaacggccctccaccttaggaagccagttcaaacagtctctggaccagctgatgaaaatcctgaccaactgccagccttacttcatccgctgcatcaaacctaatgagtacaagaagccgctggtaatgacaggaggctggggcacagcaaaggagggaggaggaggaggctgatggcctctagggttgtggtcactccctctgccagggcctggctagcgttagagctgttactgcccctaccttacagataagtacactggggtaaggtgaccagactaggtcatgtgaaggtcagtgacctgcagagctttgggttgctgagacctcagttcccttagctccgccatgcatcttctgtgcgttcttggcctggctctttgctgctgtgagcctcagttttcccttctgttaagtcagacttgctcctgcctgcaggaatgcactgagggttggacatgaggtttgcagtacatgtcccatatgtaaaccacactcaacaaaggcagaaatcagtaataggactttagaggctgacaccactcctttcaccagccctgcagacagtcagctttacctgctgtgagacggtgagggggtgagagcccacactccctgcccacaacggagtccctgctccattgggtggggagtcccacccagaggccgcatatgcagggattccccaaactaggagacatcagctgaaacaatataaaatggttttatccccataagggaataaaaatattacatgaaattaaatgctttttggaaagaataaaactatgtgaaatcgagtttgatctgggtgcagtagctcacgcttgtaatcccagcactttgggaggctgaggcgggaggattgcttgaggcaagcctgggcaacatagtaagaccttatctctgcaaaaaaatttaaaagtataaaaattagctaggtatggtggtatgtgcctgtagtctcagctactcaggaggctgagggaggaggatcacttgagcccaggaggtcaaggctgcagtgaactatgatcacaccactgcacttcagcctgggtgacagagcaagacctgtctctaaaaaaataaaatgaggcttgccttatgaaatctaggttgcatcttccttgaaggcaaaataggcagatgtgagataacctatcttgttccttaactgctgggagaagtagctgggctcccagagacccttggctcgttcagaccctgcctaccttgggagctgggagttgcaggacaggcaggcaggcctgaggctgaagctcgggggttaagagtgcctctggctgggatatctctcattggtggctgctcagggttcaaacccaggctcagccccttagaagcaaaaccctatgcctcagcacctcatctttaagttggagccaatcacccccaccaggtaggaatgttgtaaagattcagtgagaaacaccaggcccataggaaatcgtcagtgaagcgcagctaaacacttacccgaggctaagctcagtgtggcctggaccccaccagcagttggcgctgtgaccctgcaggtggggtaacagtgcctgctggtgggtttgccacatcagagggcgttccccagggtccctcagagactcctggcttgtaggtggagaggggctctctagaatccaagccatggcagagtcttggaacccctgctgaagcctgacaccccagggaaggacatcatgccatttctctgccagtcacactcgcctcaaagcaaaagacggctcagctccctggggccaaaggccctccactcctccgccccagccactccaggtctcactctgacctccatctccagggagggagagactaagttgattaggatattttctgcctctgagtagatttattttttcatttaactattgtgagggaggcaccatgaaactgcaagtgcctgcggggcagctttccaccccgacctatgtaggcaaggggcgcttaaaaacattttaaactgggccaggcgcggtggctcaggcctgtaatcccagcactctgggacgccaaggcgggcggatcatttgagctcaggagttggagaccagcctggccaacatggtgaaactccgtctttaactaaaaatacaaaacttacccgggcgtggtgctacacgcctgtaatcccagctactcgggaggctgaggcaggagaatcgcttgcacccaggaggcagaggttgcagtgagcagagatcgtgccactgcactccagcctgagcgacagaacgagactccatctcaaaaaaataaataaataaaatttaaaaaatttttttaaaaaaagcattttaaactgggcatgtgcagaggacgtttacattcacagcgcttcgagtagttgacagtgatgggagtgctgtgtttctgtgggtgccacagtttccatgctatcgacttttatctccttgacaacattacgggtttttcaactacttgcactactctcttcaaaatgtagccttactgaagtcgcatttgtttagttcttccatctctggaggacagtgggggtgggcggggcggggggctggacacactgacctctggctgtgggcccgtgcccggtggtggggtgccgggaaggggggtggctggaaagtggggcttgcgctgggtcagcgcccggtgtccgcccacagctgttcgaccgggagctgtgcctgcggcagctgcgatactcgggcatgatggagaccgtgcacatccgcaagtcgggcttccccatccgctacacgttcgaggagttctcgcagaggttcggcgtgttgctgcccaacgccatgcggatgcaggtcagcgcccctcggggacggtcacctctggccatccgcggccttcccctcggccttggcacctccagcccccagtaccgagggggtctcccgctgccctccccggccccagccttgcgatgagccctgtccttcctccctctctcctcctcccaccctaccctctccctctcccagcgccgcggaagtgagggggctttccctggggtctgggagagctggcggccgcagcggttccttctggaacatgtctgtagttgtacagcagacacgttctctcctaccgcgtcagggagccgaggtgtggctagaaagctactggggcccgaggttcttcctgtcctgtctggaaccctcagccatcctgaggctgggcctggcctgggccgagtcccacagcacatggaggccccgggccccgagttccctcctcaccccaacccctattcgaggttcccgttgtgcctgtgcctgggcgggggtgggcggcagcccctgatgggggagcctgtgggagaaggagggagacaccacccccagagagccgccgaggggtctctgccccacctcccaccgatacccccgtttggtcttggcagctgcaaggcaagctccgccagatgaccctgggcatcactgacgtgtggctgcggacagacaaagactggaaagcggggaagacaaaaattttcctgagggtgagaccccgaggaaccagccagctgtcggcctcctgcagcatgtgggcttgtcagctcttgcaccaggcccggggtccatggtccatgtgccctgagccaatgacactgggcagcagctcaaagtgtggtccccaccctcagggcacccctggatgtagaacatcacgctaggggacaatgaggtggtggtgagggtactggggagggccagcccagcctgtggaagcccaggaggcttctcagaggggtacctagggcaaggcctgagggtgcagaggaggcgccttccagccacagggcagcacccaggagctcagggcggtctgccggtgtcctgagacctggcctccatcatgctgggagccacatcctgccatgcaggcttccctacactggggaggcccagcctctgcagagcccggagggctactgctttagtggaagggtgctgtgtgtcaactctccacaaagcgacttgtccttagcggggcttgtgcgagcctcaccaccacaacctgcctcccccaaaatgcacagggagctgaagtcacacaaaggaagcttcggggccctccagaagtgccatttgggtcagagccactgaggagggaaccttcctgtcccctagtctcataagcctcagcgggccagcacagtgagagggaagaggaataactgggagcagagctgggaggatgctttgccagcttgcctgagctcccacccatccctgctgccccttcctcttcccccatagtgcctgcccacctgcccttatgtgtcctcagagggacgtcctggccccagccctcgagtcggtctgtctgtccatttggctgtgcagtagtcaggctgttctgggtctcagaggctaagatgcgcgggaagaagcagagtggcttccaatttagtgggggaggcaaggccagcagagggaccatctcagtgcactgtgggtttgtcataaatggctcttattattttgaggcatgttccttcaatacctagtttattgagagttttttttaacataaagcaatgttgaatttcatcaaaggccttttctgcatctattgagataatcatgtggtttttgtctttagatttgtttatgtggtgaattacgtgtattgatttgcatatgttgaaccagtcttgcatcctggggatgaagccaacttgatcgtagtggataagctttttgatgtgctgctgtattcagtttgccagtattttattcagaatttttgcatcgatgttcatcaggaatattggcctgaagttttcttcttttgttgtatctatgccaggttttggtatcaggatgctgctggcctcatagaatgagtcagggaggagtccctgcttttcaattgtttggaatagtttcaaaaaaaagggtatcaactcctctttgtacttctggtagaattcagctgtaaatccatctggtcctgggatttttttcattggtaggctattattgccttaatttcagaacttgttactgatctattcagggattcacctttttcctggttaatcttgggagggtgtatgtgtccaggaattcatccatttcttctacattttctagtttatttgcatagaggtttttatactattctctgatggttgtctgtatttctgtgggctcagtagtgatatcccctttatcattttttattgtgtctattggattcttctctcttttcttcttttttagtctaggtagtggtctatctattttattaattttttcaaaaaatcagctcctggattcattgattttttgaagagtttttcgtatctctatctccttcagttctgctctgatcttggtttcttcttgtcttctgctaattttgaagtttgtttgctcttgattctctagttattttagttgtgatgtcagggcgtcaatttgagatctttctagctttctgataagggcatttagtgctataactttccctcttaacactgctttagctgtgtcccagagcttctggtatgttgtctctttgttctaactggtttcaaagaacttcttgatttctgccttaatctcattctttacccaagagtcattcaggagcaggttgttcaatttctatgtagtcgtgtggttttgagtgagtttcttaatcctgagttctaagttgattgcactgtagtctgagagactgttatgttttccgttcttttgcatttgctgagggtgttttacttccaattatgtgatcaattttagagtaagtgcatgtggtgccgagaagaatgtatactctgttgttttggggtggagagttctgtagatatctatcaggtccacttgatccagagctgagttctaaatatctttgttaattttctgtctcgatgatctgtctaatattgacagtgaggtgttaaagtctcccactattattgagggtaacatttttatattgaaacaagcatggggcttttacacggttggatgcaaatgtcacatgaattttgggaaataaaacacaacttcaggaaaattttgtgccccctcttgaattcttcagagtagaaataaaggatgccagattgaattagcaagaagaaagagctaatgtgggaagttcttggattggggtgggaggtatagttgcagctcctgtctctgagcaacatcaaggtcactttgagggcccccttctctggcctgccctcctgggagaagcctgagagatgctaccttcgggagacagagccctggccccaggcaggggctgtagggtgagggtgagcagcccagtgacggcgtctctcctgttccaggatcatcaggacactctgctggaggtacagagaagccaggtgctagacagagcggcgctcagcatccagaaagtccttcggggctacagatacaggtgccggccccaccccaaggcccacccagcctactcctgcccacagtgtccccacacaggcctgcagcccacaaaccaggatcacatgttcccgctgggccctccctggggttactgagatcttccaatgccttccaaccagggacactgcagcctatgttggccagagaattcagatacattattggaatgtttggaaaaaacaaaaaaacactccatatgcaagagatgggagccgaatgaaggggcagccccgctctcaaccagggtttgacgttccacttccattatatcaaagcgtatgggtttgggttgtgaggcaatttgcttttggacaggaaagaatccatggcttgcctgggttccctggtcagtaagagggtaccgctagagttgtaatccaggatcagtggatcagcagcgctgctgccttgccccaccctcacctgggttcctgagccaccatagcaagggctggaaacccaggcatgagaaagtagaagacagccagccccgggaatagagaatgaggggacagagagcagggcagggagcagggagctagggcccacagctagagaggcagctgtgctgctgggaagccggaggccatctcagggccagaccctggtgctgctgatctcaggacaacaggccgcatctgaccaaacaggcccacgtggtcagaggcgaggcaggctggccaccctgactcccaacattttaaattaaactttttgttttgagattactgtagatttacatgcagttgtaagaaacaatacagagatattgccataatcttcacccatttcccccagtggaacgtcttaccaccaggattccttctgcggccttgtttagccacgccccctccctcacacctgcccccagtgctgcttaaccccagcaacctctaacctgttctacatttctagaatgttgccattgcacaaatgttatatacgtggaattatacaacatgcagcctggggtgggcttttttcacttggcatgtttctctggagattcatccaggttattgcttgcattaatatttatttatttatttatttatttatttatttatttatttgaaacaaagtctcactcagtcaaccaggctggagtacagtggcacaatcttggctcactgcaacctctgctttccgggctcaagctatcctcccacctcagcctccaaagtagctggtactactacaggcgcccgccaccatgcctggctaattattgtattttttgtagagatggggtttcgccatgttacccaaactggtctcaaactcctggcctcaagtgatccgcccgcctcagcctctcaaagtgctgggattgcaggtgtgagccactgcgcccagccagtattttgttactttttattgctcggtggtattctatgggatggatacaccacagtttgtttaaccattcacctgtagaaggacatctgggctgtttccagtttttggctttgatgaataaagctgttatgaacatttatgaggtttttgtgagaacatcagttgccgtttctctgggttgtatgcccaggagtgcagttgctgagtcatacaacggttacaagttttgttttttaagaaactgccaaagtgttttcaagagtggctgcaccattttacattcccaccagcaatgtctggctgactcagtgtccgtgcatcctcaccagtatttgatgttgtcactgtttattttagcccttctgacaggtatgtgatggtctctcattgtggctgtccttaccatttcccgatgtggaacacctttgtgtgtgcttgtcatgtatgtgtcccctctttggtgacctgtctgtgcatgttgcttgcctgttttctaattggagtctttgttgagttttgagagttctttatatattctagatactagtcctctgtcagctatgtggtttgtgaatattttctcctagtctgtagattgtctcttcatcctcttaagagggctttgcagagcaaaagtttttaatcttcgtaaagtctaattgtcaaatttctctttcatagatcgtgcttttagtgttaagtctaagaactcttttcgtcaagattttcttttgtgtttttctaaaagtttttatagttttaaatatgttacatgtaggtccatgatacattcccattttgaattaatttttgtgtagagcgtgacacttaggtcaaggttcttttaaatttttttctatggttgtctccccagtattattcataaaaaaaagtctatccttccttcaatgaaatgcttttacatctttatcaaaacctagcggtgtgggtctgtttctatgttctctatcccattccattggtcgatgactctatccctccacaatgtcacaacatcttgtttatcatagttatataataagtcttaaagctgtgtagactaattcttcccacttttcttcttcaaaagtgttttagttattgtagttcctttgcatttccatgtacatataaaaataattttgtctatatctacaaaaaaaaccttgttgggatttttgatagtaataggcttgtatagcaatttgagaattaacatctctactaaatccatcttccaatccataaacatgatacgtagctccatttatttagctcttatttgatttcatgcatccgtgttttgtagtttttagcacacaaaccctgtacatgttttattagatttacatgttttttttggaattataaatggtactgtatttttaattttgacattggcatattcattgctagcaaatagaaatatgttggatttttgtgtgttgacttcatatcctgcagccttgctgagctcacttttcataaattccttagaattttggatgtagatcgtcctgtcctctgcaaatagggacagttttctttcttttttttccaatccgtatgtcttttatttccttctcttgcctattgcagtagccagaacatccagtattgttagagtggtgagaacagatatatttgctttgtcctttatcttagggggaaaacactcagactttaaccattgaatataatgttagctgtaggtttttcattgatgccctttctcaagtcgaggaagcttccaatattcctagttttctgggagtttttatcatgaacaagtgttgaatgtcaatttttttcctgcatcagttgataatgatatgtgatttttcttctttagcctttcaatgtggtgagttacgtttactgatttttaaatattgaaccagctttgcatccctggaggaaacaccactcggtcatagtgtataattcttttttatgttgctgaatgctatttgttaatgtttcattaaggatttttgcgtctatattcatgacgtctgaggattttttttcttttgtcttgtctggttttggtatcagagtaacactagcttcataaaatgaattaggaagtgtttcctcctctgttttctggaagaaattgtgtagaattgacgtgaatttttctttaaatgtttggcaaaagtctccagtgaaaatatctgggcctgggaatttttttatagagagtttttaattataaattcaatttatttaatagttataggaatgattcaaattattttatattgagcgagttgtggtaatttgtgctttctgaggaactagtccatgttatctaagttgtcaaatgtatgcatgtcaatttgttcataatattcccttattatcctcttgatatctgcagactctgtaatgatatcccctgtgtcattcctgatattggaaatttatgtcttcccctttttttcttggtcagtcttgctaaagatttgtcaattttcttgtcctggccgggcatggtggctcacacctgtaatcccagcactttggaggccgaggcaggcagatcacctgaggtcaggagtccgagaccagcctggccaacatggcgaaaccccgtctctactaaaaatacaaaatttagctgggtatggtggcaggcgcttgtaatctcagctactcaggaggctgaggcaggagaatcgcttgaacctgggaggtggaggttgcagtgagccaagattgtgccattgcacttcagcctgggcaacaagagtaagactctgtctcaaaaaaacaaaacaaaacaaaacaaaaaacattcttgtccttttcaaagaatcaggctttagtttcattacttcttctctaattttttatttttaatttccttaatttctgctcttttattattttcatccttccaaaatatatccttgggtgtattttacccttcttcctctagattcttgaggcaggagattagattattaattcaaggcttttcctcttttctaatgtagagtgatataaatctctgtcttagcactgctttagctgtgtttcacaaatgttcacatgttatgctttcatttagttcattcaatttcattcactttcactcagaagaaaaattaaattttccttgaaatttcctctgtgaaatttagaagtatgttgtttggttttcaagtgtttagagatttttctgttatcattttgtctttgacttctagtttgatttcactatggtaagagacacactctgtatgaattaagttctattaagtatgttgaagtttcctttatggcccaaaatatgtcctctcttggtatatattctaagagcacttggaaagaacatatattttgctgttaattcggaggtgtgctctgaaaaatgtcaattagatcttgttggttgatagaggtgttgaagtctatattgttgctgattttctgtctatgtgttttatcaattgttgagagagtctctaattataattgtggatttgccttttccatttcagttttatcatttttgcttcacatattttgcagctctgttgtttggtgaacacacagttaggattgctatgtcttggtggatgtgctttttattatcatgtaatatccttctctgtctctggttatctcctttgctctgaagtctactttatctggtattaatatagccactcctgttttgattactatttacatgatctatatttttcatccttttactttcggcctacctatataactatatgttaagtgagtttctcatagacagtatgtaatcgggtcatgtttttcaatccattctgccagtgtatgtcattggcatacattaaattctcccttaacatcatcaacagattcttggaaactatgactttccaagaatatacagcaggtgttcgaatatcattgttcccttcaatgtggtttcattataatgatgagaaaaccgttggttccattacatatcatttcactcaaagcctgtttccaagaaggtatcagcaacattgaggacttactgtatttaggccttttacatttaatgtaattattcatgttagagctcaagtctgccattttattttttgttttctatttttttcctctctccttcgcatttttatgttttctttttcttgcctttctatgacttatttaaaaatttttaagtatttcattttgatttatctacaatgtgttagagtatatatcttttttatagctctctaaagtggttgcattaggtatcacactatacacatacacacagagagaaagtatctaccgctgtcatcattttaccacttccagtgaagtatagaaactctacccccttttatgtccatttaccttctctcatatgtaatacaattttcttattttctctacatacatgtagaatgacatcagaaagtgttggccaggcacggtggctcatacctgtaatcccagcattttgggaggccaaggcaggaggatcacttgaggccaggagttcaaaacctgcctggtcaacgtagtgagaactcatctctacaaaagaaaaatacaaaaattatctgggcatggtggtgcatgcctctagtccagctatttgggaggctgaggtggaaggatccttgaggccaggagttcaaagttatgttgagctctgatgacgccactgcactccagcccaaatgacagagtgagaccctgtctccaaaaaagaaaacaaagaaaggaaacaacaacaacactttctttgctcatctataagaagcaactcctggctggcaagatgacttatgcctgtaatcccagcactgtgaccggctgaggcaggtggctcacttgagctcaggagttcaagaccagcctgagcaacatggtgaaacctcatctctactaaaaatacaaaaaattagccgggcgtggtgatgtgcaccggtagtcccagctactcaggaggttgaggtgggaggattacttgagcctgggaggtgaaggttacagtaagccgagattgcaccactgtactccagcctaggcgacagagtgagaccttgtctcaaaaaaaaaaaaaaagtaactcctaatccattcaagttttatcatgaaattgcagcaaattcgccacatcttcaggctccacttctacttctaattctcttgctattcccgctacatatgctgtttcttcctccactgaagtcttaacccctcaaagtcattcatgaggattggaatcaacttctaaattcctgttaatgttgatattttgacctcctctcctgaatcatgaatgttcttagtggcatctagaatggtgaaagctttccagaaggttttcaatggactttgcccagatctattaggagaattactatctatggcagctatagcattatggcatttatttcttaaataagacttgacagtctgaattaccctttgatccatgggctgcagaatggatgctttgttcacaggcataacaacattaatctccttgtatgtcttcatcagagttcttgggtggccgggtgaattgtcaatgagcagtaatagtttgaaagaaatctttttttctgagcagtaggtctcaatggtggccttaaaatattcagtaaaccatgctataaatagatgtgctgtcacccaggctttgttgtttcatttctagattacaggcagagtagctttaacgtgattgttaagggccctaggattttcagagtggtcaattagcattggcttcagcttaaagtcaccagcttcataagctgctaataagagagtcagactgtcctttaaagatttgaagccaggcactgaactctctatacctctctattacctagaaaagtcctagtggcgtcttcttccaatataaggctgttttgtctacattgaaaatctgttggccaggtgtggtggctcatgcctgtaatcccagcactttgggaggccaaggtgggtggatcacaaggtcagcagttcgagaccagcctggccaatatggtgaaaccccatctctactaaaaatacaaaaaattagccgggcatggtagtggaagcctgtagtcccagctactcgggaggctgaggcaggagaatcgcttgaacctgggaagtggaggttgcagtgagctgagatcacgccactgcactccagcctgggcgacagagggagcctccatctcaaaaaaaagaaagaaaatctgttgttgagtgtagccacatttatcaatgaccttagctagatcttctggataactcgttgcagcttctccatcagcacttgctgcttcaccttgcacttttatgttatagaagtggcttctttccttaaacctcatgacccaaactttgctagcttcatacttttcttctgcagcttcctcacctctctcagccttcacagaattgaagagaattaggatcttgctctgggttgggctttggcttaaggaaatgttgtggctggtttgatcttctatccagtccacgaaaactgtctccatatcagcaagaaggctgtttcactttctcatcattcatgtgttcactggagtagcacctttaatttccttcaggaacttttcgttcgtattcacaacgtggctgtttcgcgcaagagacctagcttttggcctgtctcagttttggacgggccttcctcacgaagcttaatcatttctcacttttgatttaaagtgagagacatgagatgcttcctttcacatgaacacttagaggccattatagagttattaactggcctaattttagtatcgctgtgtctcagggaacagggaaacagagaaaagagagagagatggggcactactggttggtggagcagtcaaaacacacacatttgttaagtttcccatcttatatgggtgcagtttgtggtgccccaaaacaattccaattgtaacactaaagatcacagatcaccacagcagatgtaataataatgaaaaatttgaaatattgcaagaattgccaaaacgttatacagacatgaagtgaccacatgctgttggaaaaatgataccaatagactagctcaacacacggctaccacagaccttcaatttctaaaaacacaatatctgcaaagtgcaatagagcaaagtaacatcataataaactgaggcatgcctgcatctctatatgcactgagcttgcctgggagtgactccgtctcgccagagcccagctttcaggttttcttctccgtgtccagccctgggctagtggccagaggagggccgtctgcaataaaaatgcggaagtaagttttatccttttgtagctctttgggggtagagggaatgagggagaattttctgataacttaaaaaaactggactgttggctggacacagtggctcacgcctgtaatccagcactttgggaggccgaggtaggtggatcacttaaggtcaggagtttgagaccaaactggtcaacgtggtgaaactccatctctactaaaaatacaaaaattagctgggcgtggtggcaggcacctgtaatcccagttactcaggaggttgaagcaggagaattgctcaaacctgggaggtggaggttacagtgagccgagatccgtgccattgcactccagcctgagcaacaagagtgaaactccatctaaaaaaacaaaaaacaaaaaacactggactgtcatcatccacaaatttgggttgctgatagtagattttttgttcctaacctgcctgtgcgtcttttggtctgtaacaccttctgagaaaggattgtacgtattcatttttcccaatatttcactaaccctgttcccttccaaaccagtttttctccctcagaagctttaaaccatctgggattgttacatgtgtgtggcttgcattgcccttctaggaaggagttcctgaggcagaggcgggcagctgtgaccctgcaggcctggtggagaggctactgcaacaggaggaatttcaagctggtgagagagctctctggggcggctgggccgcgggaccagcgggtaactgtccagtaaaagacagatttgtaaagtttgtttctctgaatgagagacctcaggcaggaaggatcaaatcattcacagacgtggcatgcaaatttaaaatgatcagacctcagcatcccacacagtctcttcttagcataatctctggccccatggtctgcaggcttcaaaatgttttgcagaatttggagcatcctcagagctagactaggtgtcctgctctggaatggaatacctcctgtcttttcccaacttgcaggcaacaaataagcaaatggattgattattctttgttccaagtaccttttcctaattttttctcttaaccacgggcatttgctaatgagtatctgctcaaaggaatgaactagagcaaccatggctgtgcctgtgtcacttggccacttgcttttgtcacggatgtgactggttatgacacgaaatggtcacatcagcaagactggcccagcctgcctgcattccatgcccaccaatggcatgatagtagctgacctgtgtggagcagttccttggggcctgttgcttcgcatacatcattttatttaatattaaaccaactctgtacgtcaaggaactgagacatagaggggttgagcagtttccccaagagcatgagactagtaaaccccagagttggggtttagatgaggggctgtgacttccaagctcttaagccaacccgttgggcaggtctttaggaagcccagggactgctgtggcccaggggatgtttgcggcactgacgtggtgttcatccatttattactgcacttttactttaaagatgccctcagggatttgagtggccacaggcctccacacgggtgtgctagcccgtgagcaagtcagctgaacttggctggcagatgtggacagcagggcctcaggaatccactctcccatttcacccatgtgaaatccacaccaattctctccatccacggccccaaggaggccactttattatttatgctatttcacaaatgcttatttagcacttatttgcatgtcacgctctggcctaagtactttgtaagcaataactcactattcttgtgttcataggtgtgtaccattctagcaccggccctttgccaaaacaaaactaactgtaaatctatcttgcactgcctcctggggagcacccctctctgtttcctggggaaggccttcttgcccctgatctcacctctctcttgcctccgcagatcctcgtgggctttgagcgcctgcaggctattgcccggagccagccgctggcgaggcagtaccaggccatgcggcagaggacagtccagctgcaggccctgtgcaggggatacctggtgcgccagcaagtccaggccaagaggagggcagtggtggtcattcaggcccatgccaggggcatggctgcccggcgcaacttccagcaaaggaaggccaatgtaggtggtcacctggcctcttgggcaggtggggctggctggggccccagtgggtgagggcaagaaggagtgagcggctgtgtagagagctcaccagaagcgctttggaaaatccccccgcccccgccacaagccaagacgttaaaatctgttcaattactcaagagcacagcaaggatacaggacacaagatgcaaattagcaggcacctgggctgagatgtagctatcacgagagacacaccgtcctcctctccctattcaaagtcagttctacaatggctctgcaatggctggggagccgtggccaccacccaggagcacgcagggtatagcatgggagaggcagcaggtcaatgggacagccttagccttgaacctggaaggtgagctcaggtcccctccctttcaccttggagatgatttctggggcagggatggttggtcccctggaaggtgcagcaaagctgagccagacaagctgggaaaggccccagttccatggaagagagcaaagtgtcctggttactgggctgtgtatgacagctcaggggacagagaaatattaataccaaggggagctgctgagtgtctggggggctgggaggacactgagcagggggacagcaccaagaaaataaccccatttcctccatcgagtactcgagactcaaccttcacacttggctcatttggaagttgtgataaggcaaaggggctaggatgacgttgacttctgctccatggatgaaaacttggtctactaagcacactgctaatacagtgaacagggcaaatgagagaatgcacccatagacacgtcagcagcatgcttctgcacccgcatgcccccagctgcctgcaaagcagccttatctgtgacttcgttactgcagcccctggggacctgtcctggtggaccctttttgccctttgaataaagggaccaagtggtcctgagcagtggttgtgcagctgggttcctgggggtccctggagtttgaaggggtgccttaagagccatctgagggtagggacaagccagcaacctcacctctccagagctctgattatcactgggaaagggaaagccctggctggttgatctctaaccacactagctgttaaaatctactgtttcagagcagaatattgatttggacaaatgatggcaggatgaggcttacttggcttctgggaggtgcttgccctgtggggtaggcagggctgggccccctgagccctgctgggcccctgggtaaccttcctccacggggtatgcaggcgccgctggtcatcccggccgaggggcagaaaagccaaggcgctctccctgccaagaagcgcagatccatctacgacaccgtcactgacacggagatggtggagaaggtgttcggcttcctccctgccatgattgggggccaggagggccaggcctcgccgcactttgaggtaacacaagcctggtgtccacaatccgccccgggtggggacagggaagcctgcccagtccgtgaactcagtccacctctcggctccctgagaagccagagcggtggccaagtgtgtgctgcagccctgctggtcccacacggaagaggggagcgtgcgtgggttctgtggtcaaagccttcgagtcaggcaggcttcccacctgcaagacttcctggagccttctctaccaatgctgccgggctctccatcacatggcattccccgcgtatatttgaccccacccgggcacccccagagcacctttgaggccgctgctctgcagtgtggctgaggaagctgcagtgaggatggtgcatgcggcagaggacacagtgtctgagcgtggggccaggaggggagagggcaggagccctgcccctgcccggcagggtgtgtagagagccctgtgctggcacacggcagcccacctgagcccactgaatgtggggatgggtggtctccagcacctgagggatcagggtaatgcaacagcccccgtgctgcccggcctgctggacagtcagctgatgggttggttgttacctgaaagccctgctgacccgtgttctccctcaatggccgtaggatctggaatcgaagacccagaagctgcttgaggttgacctggacacagtccccatggcggaggagcctgaggaggatgtggatggcctggccgagtacaccttccccaagtttgctgtgacttacttccagaaatcagccagccacacacacatccggcggcccctccgatacccgttgctttaccacgaagatgacactgactgcttggtaccagggttcactggcttctagtggatcaggccagccccgagcctggggtgtgagctatggctcggggaaagaaggaaggggccatagtcactgatgggttcccactgggccttctgtcttgtttccccaggccgccctggtcatatggaacgtcatcctgaggttcatgggtgatctcccagagccagtgctgtatgccaggagcagccagcagggcagctcagtgatgcggcagatccatgacacgctgggcagggagcacggtgcccaggttccacagcacagtagatctgcacaggcaagtggggggcagcagcgggcagaggagggcgacacctaccaggtgcctaccagggcccagtccctggggcagctggacaggacggagagacaagacctggagccctgtcctcagccttacccatggaacccagcccccaggccatggtgcaggcactttcagtattgaaccatgttcaggagctcatgaatccccatcccgggctttttgaattatacagtcattaacggagagggtgccctggactctgagtattgggtgtgacttgagccagattcagatgcacataacaataacaataacaggtgttactgactgacagcctgctctgtgccagctgctactcttaattcaattcccaggtgggccaaccctacaaggtagggatgactatatttatttatagctaaagaaatgaagagctgaaatgacctgcccccagttgcagtggacatgtgtatgggacctgggctttgaatccattctgctgaattcaaaaactgagctcctgacccatgttctaccttgccctctaatgaaagttaattcacatccatttttggtcagaagtccttcctaaggtccatttccatgctgtaatgttagtggaactaaccaagaacagtccaaatgaattacatgcagtgacagcactcagtggcccgccagtggcaggagcccatgactgccccatgtgccaggtaaccagctgggacttagctcaatacctgtggggtcctgtgtgcagactaactgcataggaatctaaaggagcctgcagccccatcacatggccaaccttgtccaggaattacagagaagttgcccaggcccaagccctgactccttgatctctagaggtatgggctctgccagagtgtgtcagatatctgtagctgtgtaacaaattaccccccccaaacctaactgcttcaaatagcacacattcattatctcacacagtttctgagggtcaggagcagcttagctgcatagtcccagttcagggtccctcatgaggttgctgtcaagctgtcccctggggatggtgtcatctgaaagcttgacagctggaggggctgctcctaagagggctcactcacatggctgttggtgggaggcctcagttccttgtcatgtgggcctttccacaaagctgcctgggcatcctcacaacatggcttccctcaacatgagtgatccaagaagaaaagcaagaaggaaagtgcaaatgtccagtcttggaagtcacatacctgtggctgtgggaggggcccacacagggcaggaatttcaggacgcagggatcacgggggccatgttggaggctggcagccactcagggaaaagactctgggaggcagtccagccaaccagcacctctgaagggtggacatggggggaagcaggactggcttcccagaggtcagatctcaggttttctgtcctgcatgtgtttattaaatatccatgacgtgccccagacacagagcagtgagcccagcaagcctcactgccctcacggactttgccagctcatgtgtttcatggccagcccctgcacggtaaaccagctttgacgcacccaggagctggtgcctggccctggaccaggctgacccccacccaagctcagtcccacactgagctccaattttggcagcaaattcttctcatgacgccatcatgagaaggggcggcctctgcctaaggagagcaacagatcgtagtggctgcagccagtccctccctcctacctggcctctcaaccccggctcttcggatcccctgcagagcaccttgcagtggcagagcatcctgcttcatctgctatctttactgagaatgaccatggcctggggctgtcctaagcacctgggctcagacccagtcccacctcccaggggtttactggggagaggcacaagctttgggatcagaacagccctgagcccctccctgggggctggtgacccactgagcagcttttgtctagtctcttgccttccctgagcctctgattccacacctggaagtgaggatgggacacgcacctgtatgtgtgtgtggtaaagctctaccaagctgagggactgcatggtgctttataaatcgggccaggaaatggctgggtgaaagggacacgtgctccaccccaggaggctgtggggtcagcatcactgaggtgagcccaggctcaccttcctgcgggaactgtctccctccacagagatctggctgcaaggacaaggggaccaaggatatctcctccatgaagctgaagcggtcctcccggatcacaggccaggtgagcccagagcacagaatctctgctcccagctgctgctggcctgctacagggttccagtctattgcttccctccctgtgcaccagtttcctacttggcagatggggagaatcatagctgtcctgatggctgcctttgggtttcaaggtggccagccagctgaacattggagaggaggcattggagcctgatggccttggtgcagaccggcccatgtccaacctggagaaggtgcacttcatcgtgggctacgccatcctgcggcccagcctcaggtcagttcccactcccatcccggccccattcagagcatcagatgccctcactggctctcagcccatggccacagcctcccccaccacccctatgacacctccttgtcctgcggcctgcaggctgggtctcaggacagcagatgtcatagctaccgagggttctctatgtgctctgccttttaaaaaagccatgagtaaaacccggttttaggaaaagagtcatcatggaccagtgattccttttagaacaggctgtagtgcagggccctgtaaatgaatggcttcctcatttatattatacattttgtgctttatatacaatttgctttataggaatgggtttctataccaattagaagaaacacgtatagtcagcctgcaaacactgcagttcccatccgtgttggctgaatgcgtagaagcagaatccgaacatgcagagactgattgttcactgctttaagggactgactactgtgttttaggggttcacttactttaggttaatacttttaacaaaatttgggaaactgttggtcattatttcttcacatatttttctaccccattctgtctctctcctttccttcaaaatctaattaagcctctgtaagattcttttatattgttcttcaggtacctaggggtctgcttatcttttctttcttttttctctgtgttctttagattggatagtttctattgacctgtcttcaaatttactgatcttttgtcttccctagtctgctgtcatatccatccaacaaatgttttatttcagatattgtatttttcagttctagaatttgtatttgtgtcttttttatatttctgtgccaagatttcctatttgttcattcactatgagcattgtttcctttatatccttgagcagatttacagtagtttttaaatcttttctgcaaatccaatacctgggtcatctcacggtcagtctctattaactgtcttttctcttgaggatggtggtgtgtttgtttgctcatatatctggtacttgactgttttttcctcataagtctagtacttttgggttgtatcctggacattgaggatgatacgttagagactctggattctgttatactctttcaaagagcattgattttttgttttaggaggcaactaccttggctggactcaaactctgtctcctccatgatgagcagaagctagaatccctttttagttattttagccttggctagagtacctggagtctgccccaccatgtgtgtcagggggcaaccagagatttgggaagattttatgtgcaaaatttaggactcctctgattgtctttattccaagatttcccttctcactttcaagctactgtgggtaccctaaactctctcctctggttcttcaagccagtaagactacagggcttctcaagttttagctgcctgcatgacactagctgggcaagtcttctgacttagctggttctaattctctcatggttaatcctcactggccaccacaccacaccctccaatatggcagacacataaaagctatattcgaatgatgtgtactttgggttcttcagacaccccctataggcactcccatacagtgctggtgtccagcagtgatactgtccaacactgatcccttgagacttcctactgactctaggctgaagtggaacatcccacagcctcttactgctggggtcttctagaaaatgggctgcctgcttgtgtgggatcccatctagatgcctgaagctcagctccttccacgacatcttttggtcagcaggaagctcatgcctgcccaaccatacagtacatgtacagctcccatctcctgtcctctctcctccttgcccatcaggatgggctcagaattctccaggaacaagcaggcgctaatgtctttgttcatggaggtccctaactccagagtacaaaagtcaagcactagcaagaactcaatcaacaggctctattctagtaccctgggaggtggcaaatgggcttctggagctcagcaggcatcagatggggagtgacatgggtctcttctctggcagcccccagttctcctggggtccccttcaccaacctcatcacttacagggagtggaaatgggccacagatctctctatccccatgaagtcccttccaggaatcacattccaaatttcttatcttcccttatgcaggctggaggtggcttggtggctgcactagttctgccaccttttagtaaatcctacaagaatgtgtctctttagaacgtcggatatgagcatccatttgtccttggctgcagggccttggtgaaattcccagacaaagcagatgccctgttccacatctgtcacacattccacacacacttgctcattacccactctgggtcaggccccagcctgagggccagggacagagatgaagaagacatggctctgtcctggaggagctcaccctttagctggggggcacgagaggaccaggaaattcacaatgccagtgaatttcctggtcctaagatggaccagtgctaagatggaggtctgttcagggccccacaggtgcaccaaggaggagtggccttagtgcctacctgggccaaggaaggaggaggggtgtttgccagacagagggaaagggtagacgggtcacccgtgacagactgccatggttactacttgagaccattgctacgatagttactactgtcactacttgagaccatcgttatgagacagaacaaagggggatgaacgtagaaatgaaaactgaagacaaaagaaacttttaaaggaaggggtcaggggaagaagaaaagggctccctactcctagtgagcaaagacagcccccgccctgagcttcttcagcccttagtatttattgggtagaatgagcagggaggaggaggtaacgattggtcagctgcttaattgatcacaggttcatagtattactaacaggcttcaggtgtgccctgtagataatcacaagaaacacttgtgcctgggtcgtgactgccctcagcattccttctgggcggtagacgcggtttgtcagttggccaacattctgcttttatgagaacagtttgctgtttgctcatatagcctccagtggtatactagatcacgactctcactctttcggcctgcaacatctctccctttttgttttgaattaattgagaaaggcaattgcaggctgtgcagcccttaattgccagttggtggtttgttccgtcttcgcattcagctggtactgggggaaccaggcccgtggttgggatccacaggtccctccagtctcccgttgcatggtcgcacacaacttgagggcacctacatggtttgttcatttcctgtgaaaacacaagcataccctcgttcccacaatagtaaatctcctgaaacagaagcaaaggcttttgtggctgcagccgggaggcatgccgttgctgaagcatccgctccacaagctgcaactcagcttctgcctctttggttaattaccgcggggtaaaactccactgatagcaagaggcaggctctttctgattaacagaaggcacagagaaaacaaatcaagagtttatccttctcctgcaataacaataaaaaaaaatcctcaagctctattaccatgagagatcgtatccataagcccacaaaatctactttcttcaatttacactgcacaagtggatctactagatgctatgggttgtgatagataaatctgtctcctagttgtacttccaaatccctgacctcctcgcttcttcttacgtagagaagggtacaatttacagggaataagcaacagttgagcaacttattctcccggttcaaaaacccaaaggccttgtgatatcaccaccacctgaatttctccttcacaatccgaatcaacaactcctggggttacaataatgccctgtaaattaagacagcttttacctaaaattaatcccacatatcctgttggcaaaggtccccagataccggtgggaatcttagtgagtttgtctcctccagttaacgtaacgcactccgactgggagatccaatcctgcatttccaggcattcctggagagagggaattaatgtgcctccggagacccacccctgaagcagagctgtggcctggatggggaatgccctcattgtttgaggtgcccaggtccaggcccccttctcatttcccgacaggggggtgccattttgatgaaattttgagtggcactgatgagcccaatgatttcctttattgcaatgagggcaaagtcttggtgtttttctgttgggaggggaaccgtgttataagatcccttttgcccagaggtctggcggtgttcttttttgaaatgtccaattttcctacatttataacattttcccactttagggcttaacccttggcttcttttagatctgtcagttaccaaattagccattgcctgagtcaacattgcagagcaatgaagctcagttcccacatcttgacaagctctgagaaaacctcccaagtcctctgcacatctcacaggtaccagcgcacgtttacaagccacgaaagacaaagctaaagttcgcctttctgtagctgcaaaagaagacggtacaagccaattttcatccttcctctcccgttcaccactttcgataggtgctgtaggtggggcaaaaaattctctcaaaccctgaaatgacaagaaaatggtatgtaccaaactccaaacaaaaaagagaagagaaccaaattcttccccatgttaccctgattgaaaaacttcccgttctttgtacctctaggacactgaccagtacctttttaaagcactgaccttatgctgccagcagacttgtaacggggttttttttttttttttttttttttttgagacggagtctcgctctgtcgcccaggccagactgcggactgcagtggcgccatctcggctcactgcaagctccgcttcccaggttcacgccattctcctgcctcagcctcccgagtagctgggactacaggcgcccgccaccgcgcccggctaattttttgtatttttagtagagacggggtttcaccttgttagccaggatggtctcgatctcctgacctcatgatccacccgcctcggcctcccaaagtgctgggattacaggcgtgagccaccgcgcccggccttgtaacggggtttcttattcatctggttggttttagttttttctgggctttagttttttttttttttgctccagcagaccttcctcgctcaagtccttataggaccctattgtccctatctgttcctgtctgtccctgcaagtttctcctagtctttgctagtccttgctagtctttgtctatccctatctgtccctatagtccctgttagttcccgcaagtccctgtctttccctagctctctctatttgtctctatttctatttatccctacttatctctatttgtccctgcaggcctcttcaggtcccttcaggtctgtttgtccctgattgtccctgttacgtccctgtccaggcagcacttgcagcaatttgccactgttactacttgagatcgtcattacgggagttactactgtcactacttgagaccgtcattacgagacggaacgaagggggatgaacgtagaaatgaaaacttaaaacaaaagaaactgttttaaaggggccaggggaagaaaaagggctccctactcctagtaagcaaagacagcccccaccccaagcttcttcagcccttagtatttattgggtagaataagcagggaggaggaggtaacgattggtcagctgcttaactgatcacaggttcatattattactaacaggcttcaggtgtgccctgtagataatcacaagaaacacttgtgcctgggtcgtgactgccctcagcattccttctgggcggcagacgcagtttgtcagtttgccaacattctgcttttatgagaacagtttgctgtttgctcatatagcctccagtggtatactgagctgatcacgaccctcactctttcggcctgcatcagtcacccttgagacagcccacagggtctggaatttatgagtggtttgccattgttggggcatggagcttggattccatcctaagggaagtggggaaagttttaagcaagagaggatcttgatcatatttgacttccagaaagacctccctggcgatgtggcaggatggagcctggggctgggaggccaggcagggctgctacagagatccagagagagctgatgaggaattgcccaaggaacaggagccaagaggaggggacagaggaaacatgcaggagacagatggtagcatgtgggcactggttggatcgtgggggctggttggattgtggtggctggttgggttgtgggggctggctgaatggtgggcgctggttggattgtgggggctggttgggttgtgggggctggttgggttgtgggggctggttggatggtagaggctggttggattgtggtggccagctggattgtgggggccggttgggttgtggtggctggttgggttgtggtggccagctggatggtggtggctggctgggtggtggggggtggttgggttgtgggggctggttgggttgtggccagttggatggtggtggctggctgggtggtggggggtggttgggttgtgggggctggttgggttgtgggggctggatggtgggggccggctgggtggtgggcgccagctgagtagtgggtgccggctgggtggtgggggctggatggatggtgggggctggttggattggaggaatgaagggatgggagggctccaggatgacccccagatttccagtttgggtgaatggctgatggcgatgcctgtagaccacagaaagaggagggatgcaggaactcagagagccagccatgcacattgcttcccatctctgttcggtgatgtcgtgtcgcagttgacattggctttggtgggaacatgtacaccacagaaataagcaaatgctgtgaattgggcttttcttcttgggggagctggttgataaacatttaccagcacaccactgagtattaggggaaagatgctggcctctggagatgtggcatttgaggtgttaatgggccacttttataacatgatagaggcttgagtccatggggaaggacgcaggagagaaccgcccccaacacacccccaccaggagtggggaggctccacagaccgtgggagtaggaatggtcaggagatggggttgagtggctcccatgaagtcctcacttttctctctgctgtggaggggaggggctgcattcagggagggaggtggggcctcaaggcagagagagaaatgactgtaatcaccgtgagactggggatcccgcacatctgggagcagatgggctgtgcaaagggcgcggctgctgaggacagggctgtggctggagaacctgctgcttcctgaagccgagccccaccctaaaggaccgagagcacaggccatgggagaggaatcgagtagggatgcagagcctggtggcactgtcctgagagaggaggaggctgggcagggccccggcgctggagaggtgccctgcatatgggacctctcagaggtgcacaagagctgtgtgcccaggtacccctgtctcctctcctcctccagcccccagcctactctcctaatggtctgtgtctttcagggatgagatttactgccagatctgcaagcagctctcggagaacttcaaaacaagcagcctggcccggggctggatcctgctcagcctctgcctcggctgcttcccaccctcagagaggttcatgaaggtgagagggttcatgaagggagggcgggcagggggcaggttctggtgggagcgtaggtggcccctggccctggagcaggtccacagattccagtacgtggcccatttctcctgctcctgcaggccagatgggcagccatgcctatgcttctccaggactcagtttccccatctggaaaagaggaccctgctcctggctccttccagcccctacgcagggtctgcagggccatttcactttggctcaggtgtcaggatggtgcttcaagactaaaatgagaaggtagatgacacgggccttgaaaagacaggtgtccaggagtgggccctgcctggagatgtgccacggcacctctttctagttcttaggactgaaaatggagctgggttggccgagtgttagtggccccaagcttcactgatttaatatgcctttaaattctgattataaaagtaatatgtggaaatgcagaacatctaaaaccaaaataaaagtcacccccacactcagagctaacttccgttaatatttccttctggccttttgtggtgttacagggtccttgtgatcaaacagaaaacactttctcacatgtccctttggggacagcaggaaccacggtcactgaagccatctgcgcatggcactcaggctgctcctgacaccagtaaacccttccaggctgttcctccccaccccaaggcagaagaaataacatctctctgtgagacaaaaagaacttcaatgtgttttcttgagcatgttggggacatggactcttctgcaatttttttttttgttttttttttttttttgagacggagtctcactctgtcgcccaggccagagtgcagtggagcgatcttggttcactgcatcctctgcctcccgggttcaagcaattctgcctcagcctctcgagtagctggcattacaggtgtgcatcaccacaccaggctaatttttgtatttttagtagaaatggggtttcaccatgttggccaggctggcctcaaactcctgacctcaggtgatcctccgaccttggcctcccaaagtgctgggattataggtgtgagccaccatgcctggccctgcacttttcatttactgtcttcattatgttttctcatggtgtcaacctcccaaatgccagcttgatgcctcgctgttccagaaggcactggggttgggggtgggcatttagagtccatcttccagtcattcatcaccatagaggccatcacaatcaaaaaccacacatccacctttaggataggcctgcattgttgtgacaaagagtgtgcacacatcaagactatgcaccgtttaaaacgtgttgccaaactgctcctcagaaacacactgatccatgttccttctaacgggtgtgagggtgcccctcaatgcacattatacactgagtattataattcttaagtccacctgggtggtgagtagaaactggcctcctttctgagtgtcttcctcccttctcccctcctcacccaccagtatctactgaacttcatcggccaagggccggcgacctacggccccttctgtgccgagcgcctgagacgcacctatgccaatggggtgcgtgcggagccccccacctggctggagctgcaggtaggggctggcaggggtgagagcgggcagggtggggtggtgcagacccccagggacccccagcacagctcatggggtgccttctcctaggacagaactttgtcctctgagccccgccatctcctctgcagtacctcccatgccagtggtccctgtgagtgcccctggggctcggcctccccaggcgtgacccccatctccaaatccatattcctttagggccctactagctaaggggaagatcaccggacccactcattagcattacagtgcgccagttgcttccagcactcccctccaagggcatttcacttggtgacaagggcagtagtcacaccatggttggcatccttggtggcattgctattgggcacatgtgccacctcgacctgctttggcaactgtgtcatctgtgaattctcgctgttttctcaggaagggtcattcagaacagccagccagggtggcgagagcacacctgcacccggctctacacaaagctctggccccagcctaaccccggcaggtgcccgccctgtgacccgaggtgccctataccaggagctgtgggtcacttccgctgcaccttctttctgttctcaccctgcccccgagcccacaggggctccctcccacgagccctggaattgtaggtgaacttgcagtagctgtgcatgttgacacaagggaacaatacgtaaaggccccaaaatgttcccgagtcctggactcagattcccaagagctcctggtcttctgtgaggtgaagtcactgaaccacaccaagctcaggattctcataaaagcagccactatggcctcaggctgcccccactggaggtccaggaggacctggacgcctgtggctaacattgctcttgcctggttgctgtgcttccagcggcaaacacctgttggcctgaattttgttttctatgccaagcccatggcctggggcttcagagggcccacccctgggaacccacgggatggcaagcagggcccatgggctggggagaggagggaggtagtggatggggggttggcctcctgtccataggttccaagaggccagggaactgaatctcatctgtccccaggctgtcaagtccaagaagcacatccccatccaagtcatcttggccactggagagagcctaaccgtccccgtggactcagcctccacatctcgggaaatgtgcatgcacatcgctcacaagcagggcctcagcgaccacctgggcttctccctccaggtcgccgtgtacgacaaggtaccagccaggcaccctgcccgtcagccgcctccctcatacacccagggagagcaccctgaggctcaagccctctcacctttccagcccggccaccacctaccctcccagctgccaggcacagcactgcttaccctcccagccaccaggcacaggcaggtgcacacacacagagcaaacagcctttcctcccgcactcatatggtcaccttgcagctgcgcctcagccccagcagtgccgcatgcacacctggtcccccacccagcagccacgcacagacatcaggcactcacaccagtctcctgctccaaactccctcatgcccaggagctgtggacacccctgcagcaaacatggagggtcacaccagcacagaccctcaccgcccacataggcacccccaattccacgcccacaccctcagactcacacaccagtcatccaaccgaggcgccggatgagtcacatcggccagactcatgtctgcctccttagggaaggggctgcagggagagtaatggggagtggcagatgggccattgctgtgtggagaagcccttcaggtgtccacacgggctcagcagtgtccactcagcccacgctgggctccaagggccccaggccctgtcttctacgtgcacacgctgacggtgggcgtccccgtggggtggggcatgcaacagccgctaacccctgctccccgactctggcctcagttctggtccctgggcagcgggcgcgaccacatgatggatgccatcgcccggtgtgagcagatggcccaggagaggggcgagagccagcgccagtcaccctggcgcatctacttccggaaggaattcttcaccccctggcacgactcccgggaggaccctgtcagcaccgagcttatttaccgccaagtcctccgaggagtctggtctggcgagtacagcttcgagaaggtgaggggcctgagagccaggtccaccctaggctttgccatcaggaaacatcccatagaggaggcacccaactggcttctgaggccaggtagaaggtgggggggcaggaaagggggtcacaagggtgtaggtcccttccaggcccagcctctgtttcctcctcccttaggccacaggtatgtccaagcctccggggtccgtggttctggcagcaggtcccagagggcccaggccttgcctggcctcacctctcctgctctgtttatggggcagtgagatctggtggccaagaacatggccttggagccctaacacctaagtctgaatcccacctccccatcttcttggcattgtgaccttggaaagtcctgtcaccgcagagccctgggccctcatctgactggggggctcgggaggggctctcacctggaccgtgcggagtgtaccgggagctcttttgtaggggattgtgagaaagcagagtgatcgtacccctgaagttctgggggcagcaggcacaaccctccctgtgccaagtcaggcagatgctgttccgggacccattggaggcggccatagcagtgcaggaagcccgcctggaagaggcatgggcagggggtggcaggggaccaggctccaagaggctttggtcttccagagggaaggggctccttgggtgctgcccagctgggccccagcagaaactccgcaaggggggctactggtctcccttgacaaccaaggactggaactcagatgaggaaacgccttgtcactcagagcaaccctgctgggtccaccccagaactggagagcagccgttgtcctcaggcagagggcctgtgaggctctggccaaggcctctgggattcccagcctgcatggtggcccagtcagggcatgcagggagggggaaggtcctgcccgagccacaggttagctcccctgtgatggggcaagagcccggccacgggacaggggcatcctggggaaggggggagctctcacttgtctcactcgcccccgtgggtgccctgggctgtgcaggaggaagagctggttgagctgctggcccggcactgctacgtgcagctcggcgcctcagcagagagcaaggctgtccaggagctgctgcccagctgcatcccccacaagctgtacaggaccaagcccccagacaggtgggcgagcctcgtcactgccgcctgcgccaaggtcagcctgcatgcagctcaggcacccacccgagggctctcctttgggaggtgggggggctcatggtatacagaggagatggattccctccccacaacccccaccccctggggaacaacaagcctcagcttgacagttaagtagagccctgtcccttcaggtttaagcagtcccactcagttcagctctctgtcacaggcccatgccaccttcttccttccaagctggcatcttggatgggtccctgtgctggtctgcactgtggtgtctggccaggccctcgcttcttgggatgagagggcacctgcagtggctgactgctgaccataccatggccttgggggcccccctgcctgcctctgggcctcagcatcccctcgctgggtgcatgggaaccccccaggccagagtgtatggacattctaaacattcgatacatatcgaatattttcaaatcacccttcagatttgatgcatttattacattcccaaagccagtatatgaatagtacccagccacttttctaagaaataacgctgtattcaacagtgaaaagagagttcggttggatattatagtcggtgatggacacagcacagtggtgctggggagaggaacgggtgaaggtggggagttaggaaagaggaaggaaggagactggaagacaaggagctagaggtggtccccgagagaggcccccagagacacagaagagctccagagaagaaagaagagaggcacccgggacacagactcggagcaagatgccctcctgcacggaacgagtcacaatcctgcaaggcataggctggcaagagcgagcctgggctggggcacacagacagcgccttccacagctagcgcagccccgccctacagatgctaatgaggggacgggatggccttcctccctcctcctaaagggtccccacacccctcccaggtagaatagggtggcgccaggctggacgtggtggctcatgcctgtaatcccagcagtttgggaagccaaggcaggtggatcatctgaggtcaggagtttgagaccagcctggccaaggtggcaagaccccctctactaaaaacacagaaattagccaggcgcagtggcacgcgcctgtagtcccagctactcgggaggctgaggcagaagaatcgcttgaactcgggaggcggagcttgcggtgagccaagatcgcaccactgcactccagcctgggtgacagagcgagactctgtctcaaaaaagaaaaaaaaaggatagggctgcaccagtccctggggacgtcccaggtgcctccctacaggatccatctccagacactggccttgtagagccttctcagaaggatccatcaactcttttaccctgagcactaggtgagggattcactagggaaggcaggtgacggaggtgacatccaggatcccccctcaggccccatacactcagaagcaagtcacaccactggccgtgcgagagcaggtggtggacgccgcccgcctgcagtggccgctgctcttctcccggctcttcgaagtcatcacactctcaggtaatggcatctgacagggggcagggagcaggtatgggctgggcacccaggggtcccatgcagccttcacactgccgtctctcctggccaggcccccgcctgcccaagacgcagctgatcttggctgttaactggaaggggctttgcttcctggaccagcaggagaagatgctgctggaactctctttcccagaggtcatgggtctggccaccaacaggtgcgggccctgagggaagatctcttcttacacactgagtccttgtgatgcatctgggggctcggggagagatggggagaggggcagtgtgccgtcccgggtaacaggccggggtggagggacaagaatctacgtatgcgatggcttctgtacttcggagccccaccctcctgcaccaggccgtactgcccatgaagtactccattggggcatcacgcgttgcactggcagcttctctttgaaacccaggtccacccggaaggggcagggaagcgtgcagcctctggcgggcacttatttagaaggctcctttctttgtcatggacgagaactggtggcctggagggtacaggttgtctgggaaggcgacaagggacagtgcctggtgtgtcctggggcacagggcagggctgggggtcctcttaggctggggctgacccccactcccatgggtctccatggatctcattgactgggaacttttccatgccctttgggaagtcccacccaagccctgccagagcgccccttggttgaagcacacaacagagtggcacatgcatctctgggctgtgccaggtgtacagtggccaccactccccactggccacctctcactgaggctgaccatgctgggcactttcctgtatgccacgaagtaccgacagcatcacccattctgcagatgagcggatgagtaaactgaagcacgccgaggttaggtggctcagagtaagcacatggcagagccggcagctcatctcagctctgacctttgcagtgtccctgcggtgtcactgcacaccagccacctcattatctgcccacagccaaccccacacatgggctgcaccactctcagcctccgagaggtcctgtgctccgccgtccttcatttgtccagacccacagtggtgtctggcctagtcctggccctggcagagcagctctgtgtcctcatctgtgactcaggacccccaaccccacctcccgaggctgtttaggggctggatcaggggaaggtggagggggctcctggtcacgctgtccttcatctccagggaggcccagggcgggcagaggctgctgctctccacgatgcatgaggagtacgagtttgtgtcacccagcagtgtggccatcgctgagctggtggccctgttcctggagggcctgaaggagaggtccattttcgccatggccctgcaggacaggaaggccacaggtgccagactgggtggggtggggtggggtggggtggggtgggggagggccgcgcatggggtctgtaggtaggtggcatgctcatctccacacagcagccacaaggcaagcagagggagggaaggccccaaagctctgtgggggcagctttaggcaaggccctgccttctttcagccactgcttcctcttctacaaaatgaggggctaaaggaggtggtctccagccctgcataggccagccatgctcagcgctgcactgctgcagaagcactgagaaaggccagcccccagcccagggaagttttgaacaccatccccacagcgcactgctgcaaaagcaccccattatcccattttacagacgtgaggccagaggcccagagatggaagtagctcacccagggtcacacagctcaagggggtgggagcctagttcttggccacagctctcccacaagccagcactccatcgagagctgggctgtgtctgtgggctatgggggagcatggcaaagccccaggacccccgctgggccagcctgctggccgggtggtcatgggcggtgggtggtgtggttagtgcagggacttcagaagggggtgctggttgggatgtagcagaagaggctgtgtgtggggtctttgggcagtgagaaatgtcagccgagatgtgctgccctatcgccccattcagtcctcacggccaccgcaggagggaaagaggattgccatctccaaattccagataaggaaggggtctagagaggcaggcagcactcaggccaggcgtggggactgccagcctgtgcatcctcccctccctcatccctggctcctggtcagccctccgagggtctcccagggctagggctgcagtcagagctctcgagcccccacccaccctgggctctgtgcctgtgcagctgcagcaggtgacagccgtctgaggcccctgaggttccagtcccaccatcgctcactcttggagtggtcttctgcccaccactctatgcctcggtttcatctgtcaaaggagatgacccacaaaattccagcacagcctctggcccctgcagagccctcagcaaatagcctccctgcccttacagatgacaccaccctcctggccttcaagaagggggacctgttggtcctcacaaagaagcaggggctgctggcctctgagaactggaccctcggccagaacgacaggacaggcaagacggggctggtgcccatggcctgcctctacaccatccccacggtcactaagccctcggcacagctgctggtaactggcacgctcccctgtcctcagcctgggtacccgaggtcagggtggagcagtcctgggatgcctagttgggaggcctagctcagggcctgcagcccacctagcagaggccaggagggccacccgggcagcccccaccattcctgcggcaaggtgtgtgtgcagtgccagcccagctcttggtacttagtaggtcctcaataaatgggtgttccctccctcttccatcatgggggtgtccgggggacaaacccaatctttctctgcctcatttacactctgacccagggggactcaagtctctccctgcacaagggaaccacccaccccagcccccaagaccagcctctccggaggcaggaatggcaggcattgcaacatgtacatactgagtgctgagtatgtgccctgtgcctgtggtacgagtctgggcataatagcagctccaccctcagggcagacatttgggcagataatgacacatggatggcaactgtgcaaagtgccaccaaggagaggaacaaataatagggtggggaacttaccctgtctgggaaggcatccccgagggagggacatttgtgctgaggcctgaagttggtggcagactaggcaggcagggctggggtgagaggtggccccatggagaaggggagctggggagctgggggtctgagaaacccagagtgccgtggcccccagaacgggtgatgtgggtgccacagccattggcactcaccctcccaagggaaaggagacaggcaccaagaggtagagtcatggtcctgggtcacacggcaggtgacaggggtgtgggtaagccctggcctgttcagccctgggcctgacccctcccaagtcactgaggctgccaggccgggaggagcctgcaggaagggcctcatgggcggtggctcctgggcacccacaggcctgtgcccccttcagagcttgcttgccatgtcaccagagaagaggaagctggcggctcaggaggggcagttcacagagccacgtcctgaggagccacccaaggaaaagctgcacaccctggaggagttctcctatgagttcttcaggtgccccccagccccgctccgcctcattgcacccccacctcccagccccacctcacctcattgcaccccctgctcccagccccgctccacctcattgcacccactgagagctgcagagaggccacgccacccatgtggagcctgcctggccttcccaggccaggggagtcaggaggggcttgcggcagggtggggtgctctggccctcccacagccactcaggggtgtcagaggacagagaagcgtgggacagagaaggccacagggcaggcctcacaccagcctctaacctcacagggctccagagaaggacatggtgagcatggccgtgctgcccctggcccgtgcccgtggccacctgtgggcctattcctgcgagccgctgcgacagccgctgctcaagcgagtccacgccaacgtcgacctctgggacatcgcctgccagatctttgtcgatatccttccccaccagcctgcctgcacctcgtcaatgccagggcagaggcacccagcacatcctggccctacagctgtgctctagggcaggagagcccaggagatctgagaaacctggagtggcgggacagagcccacacatggctcaccgcagggccggggtcggggtcagcgtctatccccagtctgtgtcagcgtggggctgccccagcactgtgctccttgacagccacacccatcctccggtacatgggcgactacccttctcggcaggcctggcccaccctggagctcaccgaccagatcttcacactggccctgcagcacccggccctccaggacgaggtctactgccagatcctgaagcagctgacgcacaactccaacaggtctgctggggcggcggccagcccacgcgggcaccctcagtcctcatcccggcccctgaggccagaccgaggctcagagaggacaccgcagctggtggcggcagaacccctgcctgggctcctgcctcagcagtgggaagggttgggcccttggtctgctctgctgatgtcctaggggtggtcagagcaggagaggatggccctgcccactcccaccctctgtgtgtgacctggcaggccatgacctctctgagcttcagtgtcgtcttccacaaaatgggtgcaatgcccacccgcccccatcttgagggtgtgaaagcccgtggcatcgggcagcctggcacagctggcatggtgcagcctggcaggtgccctccccctcgggccctctagaccccaggcagctctcacatccgtccctgctccccaaggtgcctgcctggccagggccccctgaggggcctttcccggctgacaagtgctacccttcaggcacagcgaagagcggggctggcagctgctgtggctgtgcacgggcctcttcccgcccagcaaggggctgctgccccatgcccagaagtttatagacactcggagggggaagctgctggcccccgactgcagccgccgaatccagaaggtcctgaggtgagcccagtgcctccagcccccagcattggccctgggcccgcagacctgggatgctgtggggcctggccagccttccaggagctcatggtcctgggaggactctccagaagccagtgtcagcttggcaggcaggattgggccccgagctgccagagaagagggtggagggtgaggcccaggagggtcaagagaaggctcagtcatagccaccagctcccctgccccaccactgcccagcagtggcacagaggcactgcctgagggatagagagaaacctggatgccccagcccaggccctcaaggctgaggtcagaggcccatccttccaagtccatgcggcctccctcatccgcccacagccgtgaagctcttccttggccgtctttgctctcccccacccctcctgcctcctctggcttggcctcctgtggccgtgaggagggcaggttgactgtaggagtggccataatttcagtggcagccgtggtcacagagagaggtgggcgccccatagaggccctgccagagtccctggcccctgcccgatgcccctgttgtgcgagaataagaatactgccagcctttcctgccggcgccttcccgggagcccctggcctggcccttccccgtgtgtgccccaggctttcaggcacagctgcaccatcactacctctgaggccgcgtggagccaggggcagcccccaggacatgcgaggggctggaaccaccccagtgatggtcactggggttttcttttgtttctggcacatggtttagggcccacatcggggctggggcatgggtgaggatgagggtgggggtggcacctgcagcacacgctgtccccctcaggacggggccccggaagcagcccccgcaccaggtggaggtggaggccgcagagcagaacgtctcccgcatctgccacaagatctacttccccaatgacaccagtgaggtgaggccctgctctggtctgcacggcaagtctcaggcctccagaggccatggggcatcctccttcctggcccagcctgctccttggtaaccccagagagccttttctagggctgtcccatcctaaccagtctcccgccctctccccatgggatgcaggccccacctgcccttgggtgctttggaagtcaggccagtcccaaggtatgagttgggggatccaggcccaggacacaggagaggacagaggggtgggcagcaagggtgagtcccaggacttgggggcccctaggggcttctgaccatctggggtgcaggagagcaggtattcccactgtgtgtgccttgtgcacagagcctgccatggctgctgggggaacaaaggggccagggggcaggtaggagaccaccaggaccccaccgtgacacagaggccttgatcaggggcagcaaagacaagcgggctgagaggccaaagtgggcagtgtcgcctcgcgccctctccaacagcacaatggtctttttggccttgatattcgggtcccggtaacaggaagttcccacagtctggctgctgggctctcaaggcgagtcaaaaggccaggcctgcagggccccaggacagcgaatgctgggactaaacaacatgaacctctggccagggttctggaagggaggcttgccctgctcagggcagaccacatccaacccaagtttcatgaaggagcaaaagtgccaggctaggaaggctcatcctgggctgtactggcccctagccaggccccgggcctcaccagctgcctctctgtccagatgctggaggtggttgccaacacacgggtgcgggatgtgtgtgacagcattgccaccaggctgcagctggcctcctgggagggctgcagcctcttcatcaagatttcagacaaggtgggccgggctggggctgggcagacggtgggcggacgggcagtgagcgaggccctaggtgctgcctgtgggggcctcagcctaccaggggcacccatgctggaccaggctgcacggccagggctgctgggacagaggtaggtggggtcctggagcagagccagctccacacgccaatagcccacgcacagccgactccagcgcagcacccaggccgtaggcggccactggaccagaacccagcaggttctcaggaggacagtccccggaagccacccaacttccctgtaccttccccttccccaggtcatcagccagaaggagggagacttcttctttgattccttgagggaggtgtctgactgggtgaagaagaacaagccccagaaagaaggtgaggaggcctctgtggagctgggggagggcgtggctgggtgggtcgagggggcactggcggcctctgtgcggcccatgcccattcatccatccattcgttcccgtgtgtccctgggttgtgggaacaaccaggccctggggcccggcggtgagggccagctcaggcagaaacaggtggctgcaccttggagtgatgaaggatgccccagggctgaggggcatgaccctcatgggctgggagtgcgagtccaggaatgttcctggagaaggcagcctctacactaatattgaaggaaaatgtggggactggggaggaagaagcgtgggggctttcgaggcagggaggtggcaggcgcagtgtggggggtggcagggggtcagggctggtgtacctgctgggacaggcttggtgcccactgctggccctcgcccaggggcccccgtgacgctcccctaccaggtgtacttcatgcggaaattgtggctcaacatatctccagggaaggatgtgaatgcagacaccatactccattaccaccaggtaccgggcaggctgccctggtgggcactggggccacccccatcttcccacacctgttctgaggctgtagaagccagcaggccagggcagggccagcctcagccctgggtaccagcccatgtggtaggcagaccaagcccctgagggctctggaaccaggagcagagggcagcaatgtttggggacagtgactgcactggcacctgcagcatgacttggagagggtgggacagagggtcctgtgacccatggagcagtggccgtggcctgcagggccaaccacatgggtggagcaggccatcacctccacgcagatgtcagggggccctgccctgactcagggtcattcccctggcctgaaactctctaccctgctcagtccgtcctggatggagtgggctaagccccagttccccaccatctgagcgggaaagaggttgggggcgggtgggccgcagctggagacccagcatgcccagtgtgtccatcacccaggagctgcccaagtacctgcgcggattccacaagtgttcgcgggaggatgccatccacctggcgggcctcatctacaaggcccagttcaacaacgaccggtcccagctggctagtgtccccaagatcctgagggaactggtgcctgagaacctcacacgcctgatgtcctcggaggagtggaaaaaggtccctggtcgggctggggaagggttcttgtgctgctgctcctccctgggcccctgcaccagtgccatgccctgcctgggctccaagatcacatgggtgcacatgggtggtgtggagggtgggctggctctgcacacaccacgccttcctatgccatccacagcaccgagactgtcccatgctgcattcctcccctcccctccccaccgtactagccctggggtaggcaggtgctgcccccaccagggctttggagggcctctgggcacccaagtccttactggccctcctgtcccccagagcatccttctagcctatgacaagcataaggacaagacagtggaggaggccaaggtggccttcctgaagtggatctgccggtggcccaccttcggatccgccttcttcgaggtgaaggtaaaccttgccccacgccagggcctcctacccaagcaggctccgctcagcccagccccagcaggcccagcgtcaaccagcacacatcttgggtggggctggccgtgaggctggagggcgtgggtgtatgtgtgtatgtgcgtgtggcctagatgagctcctgggaggtgcagcctggcctcccgggctggactatgaccgccgtgtccctccctcccagcaaacctcggagccttcctacccggacgtcatcctcatcgccatcaaccgacatggggttctgctcatccaccccaagaccaaggtagctgctgggcctccggaggggctgggggccaccaggtccagggacctgtgcaggtggggctgcagtcatctctgcggtgtgtcctgcctctctcctgtcccctaacacacacagagcccgtgctctggaggcgtccggcccacccaccctctctgcccccaggacctgctcaccacctatcccttcaccaagatctccagctggagcagcggcagcacctacttccacatggcgctggggagcctgggccgtggcagccgcctgctgtgcgagacctccctggtgagctcaggttctttctcccatccaagatgcataggacagagctgctggagactgggttccccaccctcacccctttcaagtggctcactaagagggctcagtcacagggcccaggcggggccagcagatctggagagggcctgggtgcatccccaggaccagcagccaaggtggcaaggccaggcgggaccccctgcgcccttggcccattccaaggagggagggagacccagctccagcagggcaagcagaaatgacggccccaatggcaggagcccgccttccctttctccatgccctgcactgctggttgctgaggaagagaaggtggtccctgagtccaggacccccacctgccctctgcacccacagcctctgacccccccgtcccctgtccagggctataagatggatgacctgctgacctcatatgtgcagcagctcctgagtgccatgaacaagcagcggggctccaaggccccagccctggccagcacctagcagcggatgctggcgtgtctgctcaggcgcccttcccgacctctagcctggcggcaccttcccaggccctctcaacccagggcctgtccttggcgggcagccttccatgctgccccccatacaaagcccactcagccccgcaggcggccccctctgtcctgggcgctgcccagggaggccaaaagacgggcccagaatggggtcgggagtctcggacccccaggctattggtggatgactgactgacaggacacctcccaaccccaccccaccccaccagaatgttcaataaaaactcctggagcaggagaagtgtgtctgtctgagggagcagggtgtggcacaaggtggacagggggcctgggaggctctggcccgcagagagctgcagaaaaaccaaaatgccgtgtgactgactcccccagggaacccggagggcagctgcattctccagaaatgacttcatccctccctttctgcttccttcctccccctcccttccttccttcctgtttctcagactggggaggggcactcatgggagagttctcctcccaggcccctcctcacaccttctgtccttctccccacccggggcattgatacgcctgcgctacccccaggaggccagggtggaggtgcggctctctggctgctggcttcatgctatggccagcttatgcccagacagacagtgggcagagctggacatagcaccttggaggcctggattcccccacctcgctggcatgccctgtccctgcccacctcctcctctgcccactgggccagcttatgtggacctggccacccaggcttgtgaggacctggcagggctagtcttcaactgcttatggcagcctggcctgggatagaggctagggccccctgaactcgtgcctgtctatgtctgtccctctgttcaactgccccagcagcagcgtgtccagagctgctgccatcccctccacccccgacccccgccacaaaccacgcaggctgctgtggttgtgtgaacaagccttcattgtgcaagcgtgagcccaacaaacaaacaccaggtctgcgctggccgaagacgaagcgtcctccctggaggtgggaacaagtcacctctgaccacacctcctctgacgccatcacctcctcctggccccacccaagggctcgacacaagccccaaggtcggggggagaggggcggggcggaaccgagggcggaggccaaggtgggattccaggaaggccttccgaaggatggaggtgggtcctgtccctccaggtagcttgtgggtgtggacagcaggacttgctggctcagtgtgggcacaaggacactgtgccactggttgagtgagtggtgagggattggaggtggctcccagaggcctccatctgcatggccctggccctgtggctccagcaggctgccctggctgtgggtagcccaggagccacatgcgcttagtggggccgctctggggcaggggctctcacaggacagcatgagccactgagccgcctggggagggccaggccaggcggggagctgtggtgcaatttgctcctgtccctggaggtctgtgggcggaagctgtgggcacaggtggacatggctgtcagacgtggggtcataggctcccactccccagctcctgcctcctcacagacagaagccacggccaaggagaggagagacatggggaaggcagagatgagggaacaggaagggagaaggcaatgaggaaagagaaagggagggtaagatgcggagggcacaggtggatggggacgagggggccaagcatggacagcaggaggggagaaggcggaggggccgagaggcagctgcgcaagagggccttcaggcagagttgaggtctgtggccttgggctgggccttgcgggaggtcagctccgacagcttcttcagccgcttcttcagctccagcgggaacttctcgtagcacctcttacacacgggcttcatgtcgaactccacaaacttgttcctgaggaggaagctgagctgtcagcagagccccacgcccacccctttaaccccagacaggtgactgtggagtgggcttccctcagcccccagcctccccacaccagcctctcctagccagcaggccaggccctagggtgagatggccagagagcatagggatgagaagggccttgaggcttcccttgcctcccagaggcttctctcaggttctgaaaccccagaaccctctatgcctccccacagcccttggaaacctggacgccatctctcctctcccagctccagccatcccacacccctcgaggcttcctggatgagcagctgacactgctgcttttgcatatgctgttccctgagctggaatgcccttccctccccagagcccagggttctggcaggtgtgttggaggcatgagtgttcctcctcctctcactgtgcctggggtccctggggtccctggatcccctagaccccctgaacctgcccccatctccctgggtggtataaggccgggctgccccttgtccccaccatatccccaggccagactcagctggtgtgcaggagggctgctgagaggaaggacctgcaggagccccctccaccctgagccccatcccacgatcacagggactcacttcagggtgagcttgctgttgcaggtggagcaggagaagcagctcacacaccaggccttgttgagggccgacaccactgtgagggaagcgtgggactcagcaggcctggctaggctgccgcaggcccggctgggctcacagctgcagcacccaggccccaggagagcaggtggggtgggggagggaacacagggcctcaccatcgccttcaatcacatggctgcagttgtagcagacgtccccgaagagctgtgggccgagcaggctgtcagagtagctgcaggcagtcacaccccagcccagggccatcatgcagccagcctggccctccaacacggcccctctcaggcatctcccaggccctgcctcccagggcccagctgcaaggctgggttgagggcacggcaacccatgagaaccacccttccgggaaggacaacaggctggggcgttgctccccagaaggcccctctgctctggccactgctgtcctgcaaggaggtgggcccaggtggtgactgcatcccaccagcgccccctgccttctgtaccagagcaagggagggagggggttgctggcactgtcagccccatgtgcccgggacctcacaccagccccagaacattcttcaaaggaagacactgagactgaagagagctgcccaggtctcgagaccccaggccaggagccagggctgagggtgcaggcctgggctcagcacctggcagagctcctgagggggtgcccacagcctcccttgctcacggcagctctcctggccacccctccagacccgcatccctgaaggttctgcaccgggctcacctggttgtagtgagtctcgcagtaggccaggcccttcttctcatagtgccggtgccccaggaatggcttctcacacttggcacagacaaagtgctgcaaggacaaagggcgggccgggtggcatcagggctagagcggtgaccccgagggacagtggtgacccggggacaacagtgaccccaggagccagtgactccaggggaccacagtggccccaggaggcagcagtgacagaaggggacagaaagcagagtctgggcaggtgcaggcctttcaggattcacactgggcagaggggactgacacctctgtgaatgccctggggtcagcagaccctacccctcctctaaggcactgatggtaaccttgtgagtcaccatcccctcccagtctggcctccccctcggcagcctcagccccaggagtcaggtgccagcctggtgctgcggcatggtgggccctcataggcagaggcggccctgcctgtccacgtggggcctcctgcaggcaccccctgcaagcctgggatcactgagcagcaccttgcattcccccagggatctgcatgtgaggatgagggctgggggctggggcctgcatcagggcaggaccgcatggcctcccacccaagccgccacccaaggcacagcttccggacacagcgctggccaggtcatcaggggaggtggtgggctcactgttcccagtgtacccatgagaacatgagagcccaccacccggtgggggcactccaggtgacccagtgctcacacctgaggaactcttcagctccgtgtctgcacagggctgtccatgcagcgggttctgtcatccacaacccccaggcactctggacagactgcccccaaggttttctcctgaccttggagtctcttagaatgccagcagggggaagaggagaggtgggcacagctacccaaccgtgtgtgtgcactcgggtctcctggctcccgtgggcaggctggggtccctggctgagcacagggaggggcagtacccctgaggaagggcctcgttgggagccagccacccgccctgggctgggagtgtggaggagctttagggctcttaccatgaccctgagctggggcaccccccaacctgaggccacgtgtccaccagcctggctcacctccacgtgccactgcttgcccagcgcgttgaccactcggccctcgatgggccggcggcaggccccgcagatggggacgcccatcttgtcatggcagggcaggcagtagagctcacccttcagctcgcgggcctcggctgtcagctccttcctggaagacagcgtgcagcccccaggtgccacccctgcccttctgcagggtcatgccagcagcgcctccaccccagggcacggctccccgaggggcccattctgtccctgcagagccgaggcggcagcgccttctgatctctgggcactttgaagacttcctgtgccccagacaggccctggagcacagacttcctgcacagcccagaagagtgggctgtgttctgcacccaggcctctgagaagcaggtctgttcttgggcccccctcctcctccaaaccagagggggtgtctggataggcacggagaggactggaggggacggtgggggtgggcgaggacgggggctgaggggctgcctatgcaactcctctctccaacaccagcaccaagcccactcccggtctcttgccctgccccctcaggtcccttccactgctccatctcaaccctcgtctgcagtctaggggtccagcccacccgcctcctgagtctcaagtgccccccaaacagagccctggagagagaagcttcctgccatggctgcttcccagcccccagcccacctctgccctgcagccttgctctcgggacccctctgtctgcccaccctgctcccctctccctcctcaacacttccccaggtggaggccccaccgcccttaccctgggccagccctggctccccgcccccacaactgcagggccgggctgcgcacctacccacagtgggtgcagttgaagtggtcagggtggtaggcgtcgctcctgaacatgaggggctgctcgtcgatgaccaggtggcaccgctggcagatgtacttgcccaggcccttggccttctcacggttgtggcaaggccggcagagatgcctgcgggaggcgggggcattaggggcagagcccccactcccacacagcctggccacctccaggagaagagaggccagacccctgcaacttcactgagcagctgggggcttcaaaggggctcagcccagggtatgggaaagcagactgccctgtcacaaggcccagaaggtcacaagtgtgtcctgggaatgggacgcatgctcagcaggaaagatgccagaatgctcgaggttactgtctctggatggtattttcctctttctactttctctaagcctggggcatgctgcagaatacagtagacatttaattgatatctgctgaaagcattattttcccaatgtatttaacacacacgagttataatgagtgtcactgtgcccagcagagtggccagtgagtgtcccgggaggcccactcacccccttccttcggggtttgccagatgaagaagggcccaaacacgtacaggcgatttctgtctccaaagacaagcactgctatgtcagatggaggcccccaaacccaggaactgtcactacagagtctttttgtgaagacctcagaataatttctgatgctactcgctgtgttggacgacagctgtgttctcaacggagagacaaatcaacatggtttctgtttccttggacctcaaaggtggcaggaatctagattcagagtccccaggcaaagatacacaaaggccccaatccaacctccctggcccccgtctccacctgccacccgaatctctctctggtgctcctgctgcatccaggcctcccttcccaggccccccagccccaggggccctctccactcctcacgagcctccacggctgcccgacgcccagtgttggcccctctgacaggctggtcagggaggatacggaagagatccaatcgcagacccaagatccccacccaggttatggtgggcagaccccagatgccagggccacccattcagcatccctccctggaccccaggacctgctactgctgggtgtctggactccatcctgcacagcactgtgctccatctgccctggggtgtctcatcatcagctgtgtgcagggcaaggggcccaaacaaaggcccagcagtcactggctaagctgccgactggctctctgtgcctccccaagaccctatgtgcccagcagggggcaacagctcagggtcagctgaccgaatgcctcggtgaatgaatgactctacaagagaggaagggagcctcggtgggcatcatctcccctcgactactggccagagccctggctcttacaccccagcgacgggaagcagttgtggcctgtggcttcagtcttcatcaccacaatccctgaagcccacccttgcccagacacctgtgccccagccccaaccccaggccacctcctcagcaggtctggggctgagctgccccacctggcgcctatggcggccagcccatgccccctgcggtgcctctgtcccagactcagcatgtaggccccatgaccccactccacattctggtgactcctcctgagcgtcaggacaacactcaacccacgaggaattatttctgtctcaaagatgcaggaatcagctcaacgcctcaaaactccatcaccacggtcaatgcccttgaagccatcgacagtgatcaccccaataacagaaggtctgtgagcccagaaatgccctgctcagggtggttagcttcaagccaccacctttccaaccagcctgggccagttcttccagacagccgcctgcgggcacaacaggaaagagacctgcgccccggctcagacacctcacacccagctggctctcaggccagacaaactgggaagcccatctctcttgaaggaagtccagatgggaaacagcttctcaacagaccagatcacagcatcagatctaaaggtggccttcagaattctttttcaggttgaattaggatcaaatctaagaattctaaattcaaaatgcagcagaaaaacaaaacacacacacacacggagcctaagttctggagtgacatgtgcttgggttcaaatcctggctctgttgcttcctactgtttgttgatgggtgagtttcttcatttgcctgagcctcagtttccttgtctgtaaaatggggcaataatcccagctgcacagggtgatgtgaagagacaaatttaagacactgccccttaaatgctagccacatacatacagttttcaatgtttaaacaacaaaatgtaaagtcttttgaaaccaggaagggtgatttggtttcccatgttgctggatgtatcattttcagaaagacagagagaaatgaactttgttcactcagtctcagaggcggccgccggcagcattcaaaggcaccccagcccggagccaccccagggaggagccccaggccagcggtcagattcatgggcttccgtgcagaaggggagctgcaccggcgagcacccggcctctgagctgagccgcatcctcacggacaggacagcgccccattatgaggctcctgcagctgttcctcgctccagataaaggccatgatttattctgtgtgcccaaatggggcctcattatacagggcaggacacaaggaccctacagcaagtgtcctcaaagagtcgcctctcactccgtgagcaagactcctcggcctcccaccctccgttcacaggccccctccgccgtctgcgggcgcaggcctgggagcgccgcctgttgccatgacagccggcccctccctgccccccatcagtaggaaatcatccccttctgaaacgtcctgttgtgtccctcagctccagcccaagccccccacccagcccccgcctgctctgagtctctgagacagtcacacactcagactatgtggccaagctgggggcggggggcatgggctagggacacactagaatattcacgctccggtggcagcagcagcagcagccagaggagcagcccgacacaacaagggacccctcaggaatgaagcagcctttcagggccagaggggctgtggtctcccttcctctccttaaatagccagcgttccacccacagcggcaaggagccccctgccaccaccgacacccacgggcggagatcacctgctgccccgcagacccctgtcccttcctcccggaccagcagctagaggtaaggggcaggctgggtggggtggactgggagcccagggctaagcagaggaaacactcagcggggagccctgcccagggagacaggcagcagcctgtctcgtcccatctctttggtgatggtctgacctgtgcatcgaaggctgaccacagtctgaattcacagcagcccacaaagcggtgtttcgtccctctgatgggggcttgcagaggggaagtggcttgccggcagtccaggctgcaatgacagcaccgctgcccctaaccattaggcagccttgacccatagaggagccagatgcctgggagagggctcgggccagggatggagtggcgctaatgcaaaggaaactgccaccacctggccatggcgctgccaccacaggccctccccgaggccacacatgcccacctgccacctccacagaggcctatgacctgtcctagatgctcgactcacccacagccacgggacccaacactgcccaggccccggcccatgccacgccctttcctcttacggacaccggctcggtggccgtctgaccagtgagtcgtgaggaaccagcgagtctagactgaagtttgtgtttctaaagggcaacagagagtgaagcggggcccatctcagaccaaactgcaacaatcagtatcagaactcctcaaacgggggacagaaagggagaagaaacctcagcaaacctgaaaccaaccagaaagctgtttaaaatggagtctcagtcccagagagagcgaggggcacgcccttcggcccgggcaggaagtggagggcagtgcccaggctgaggcccccgggctggaggcaggaggcaccacaggcccacctggtgccatgagatatgccacccctgccgtcactcagggccctgagcccagtaacactctgccgtcactgtcctgaaactcttcctttttgagcaaggggctgcacattctcatttcatacatgggcccctaaaatgagggagtggccccagggccaggagggggtgctgagcctgggagacaactccatggcaaactctgagactgagtcacactccccaccctggcggtcttccagggagtgagaccgtttccccggtctcacttccagctccagggccaatgtcccctggtcaagtgacctaagacaagttagcagacactcagccttgactccctaacctgcaacatggggctaaaactggtttgagccagcacaggcaggcccccaccatgccaggcagagtggtcagtcgtacctatgagctgctctctcgtggggccaggtgatgcctgcactgtggggcacagcacaggcctgagggacagcctggggtggagggcacccaccttggccccttcccacccccaggttctaacaagggcccctcactcactgggccccctctcctcttccagtctccagggcctccccgcacacaccttcctcctctcctgccaacctgaaaacagcacacc

SEQ ID NO: 414 - DNA, 28517 bp, Homo sapiens
cctgagtagttgggattattggcatggggcaccacaccctaatttttgtatttttagtagagacggggtttggccatgttggccaggctggtctcgaactcctgacctcacgtgatctgcccgccttggccttccaaagtgctgggattacaggcgtgggccaccgcgcccagccttacattagtaaattttatggcatataatctgaataaagtgggagtggcctaggacttccttgggaagaaattcctcccatgtctctctgatgaactgggaggaagcagggccagtgagtccttggctagactgagttctcagaatctagtggccttgggctccttccagctaaagatgggctgaccaagactgagctgtggagtgtgcaggaagtcccagagccctgtggtagggggtggggaacaggatggctgcatccacttgttcctgggggtttttttctttgtttttgttttgttttgcttggttttgttttgtttgagacggagttttgctcttgttgcccaggctggagtccaacggtgcgaccttggctcactgcaacctctgccttccggggttcaagcgattctcttgcctcagcctcccaagttgctgggactacaggcgcctgccaccacgcctggctaatttcttgtatttttagtagagatgagatttcgccatgttggccaggctggtctgtaactcctgacctcaagtgatccacccaccttggcctcccaagtgctgggattacaggcgtgagccactgtgcctggccatttgcttctgttttttttttgttgttgtttgtctgttttttgttttttgtttttttgagacagagtctcgctctgacacccagtctggagtgcagtggcgcaatatcagctcactgcaagctccgcctcccgggttcacgccattctcctgcctcagcctcctgagtagctgggactacaggcgcccgccaccatgcctggctaattttttgtatttttagtagagacggggtttcaccgtgttagccaggatggtctcaatctcctgacctcgtgatccgcccgccttggcctcccaaagtgctgggattgcaggcatgagccaccgcgcccggctgctcctgtttttaagagatgtgcctttaccctgatccccctcttgtggaaccccaggaccccagacatctgtctgatgagtctgtgccctggtccaggaaatgcccctcatcttgaggtcctagaaccagtgtgggagagggtggccttggcatgcttggcctggggagtcccaagctttgtagagataggggacaagtctatcaccaccttcactggatgggactatacttctttctgccccaggaaccttgggtagagggggcattggacctcaaagccagctggcagcctcagcatttcagatcaaagtggcctgcctcttcaacgtctcagcctacccaaggcatgtcctaggtgtaggctgctctctggtggccagatagggaaggactcattcatcctttggcaaggtgggctgcgatctgagctgggctgtgtgataggcaggcaactggattagacgggcagagacaaagcaatcctggggtattctggagcacataagcagaggggtaggctagccaggagcaaaagatgagatgggctggagagcacgcagagagcccagccaacttgcttcacacacactactggaaaagtaatgagttgtgtcacaactcaggctgggcgcagtggctcatgcctgcaatactagcactttgggaggccaaggcgggtggatcacctgaggtcaggagttcaagaccagcctggcgaaaccccgtctctactaaaaatacaaaaattagccaggcaaaaccccgtctctactaaaaatacaaaaattagccagccaatgcatgacagtagtcccagctagtctggaggctgagacaggagatggcaccactgcactccagccatgggggacagagccagactccatctcaaaaaaaaaaaaaaaaaggcgatcaaacagtactaaaggccctattatcaaataaataaataaataaataaataaaggctttcactcacagtgtgactctccccctccctcccacaaccactgtttacagagccttaaaaaaaaagcaaacaaacagatgataatgtgttatcttgctctgtcactctgtggcctggcctgcagtgctgtggtgccatctggactcactgcagcctcgacctcccaggctcaagcgatcctcccctctcaacctccctagtagccgagaccacaggtgcatgccaccatgccgggctaatctttgtattttttgtagagaaggggttttgccatgttgcctaggctggtctcggactcctagattcaagtgatccgcctgcctcaacctcctaggatcaggggccaccgcaacgggctagacttttttttttttttaagtcagggtcttgctttgttgctgccgagaccagctgggtcagagagaccctaacccagcggcgctagaggaattaaagacacacatacagaaatatagaggtgtgaagtgggaaatcaggggtctcacagccttcagagctgagatccctgaacagagatttacccacatatttattaacagcaagccagtcattagcattgtttctacagatattaaattaactaaaagtatcctttgtgggaaacgaagagatgggcaattaaaggaataggttgggctagttaactgcagcaggagcatgtccttaaggcacagatcgttcatgctattgtttatggcttaagaatgcctttaagcagttttccaccctgggcaggccacgtgttccttgccctcattctggtaaactgacagccttccagcgtgggcgttatgttcatcatgaacatgtcacagtgctgcagagattttgtttatggccagttttggggccggtttatggccagattttgcggggcttgttcccaacagttgcctggcttggagtgcagtggtgtgatcatggctcactgcagcctcaaacccctgggctcaagccatcctcccacctcagcctactgaggagctagctgggaccacaaacacaggcctctgtgcccagatgatttttgtagagacagggtttttccatgttacccaggctggtctcaaactcctggactcaagtgttccacctgcctcagcctccctaagtgctgtgactacaggtgtgagccaccacatctagcacacctagtgcagtccttctagagactgggccactcccagccccggagcaaccttacttaagccctccccgatcagataggcagcctgacaagttgcatttcctggggaagagcagcaagaaccctgctctgggagtcaggagttcccgattctagcccagagctgctttccttactagttattgatcttgcccaactcacttcctgtctctggctctgtttcccaatctgtaaaattgttactggaaaggggtcccaatctagacccaaagaaaggtgaggagagcaaaaatcaccccccccaagacaaaaagttcttatctgagcaatttagataaggagcaatccgccaggcgcagtggctcacacctgtaatcccagcactttgggaggccgaggcgggtggatcacgaggttaggagatcgagaccatcctggctaacatggtgaaacctcgtctctactaaaaatacaaaaaattagctgggcgtggtggcggggcacctgtagtcccagctactcgggaggctgaggcaggagaatggcatgaacccgggaggcggagcttgcagtgagcagagatcgaaccactgcactccagcctgggtgatagagcaagactccgtctcaaaaaaaaaaaaaaaaaggagcaatccaaggagcaaagaccacctgttgaccatcaaacaggccatctggaggcgaaactccttgcctggggaatttagaagtaataaaggccaggcatggtgaatcacacacactttgtgagcactttgggagccaaggcaggtggatcacttgaggtcaacagttagagaccagcctggccaacatgatgaaacaccctccctgcaaaaattagccgggcatgatggtgcatgcctgtaatcccagctactcaggagactaagacaggagaattggttgaaccagcaggcagaggttgcagtgagctgagatcaggccactgcactccagcttgggcgacagagggagactctgtctcaaaagaaaaaacaaacaaaaaaaacttccctagtatttaaagtcggcatctgattccaagcctctttcaacttttataagtaactaaaatgtctatacattctttttaaaaaaaaaaaaaaattcaacaaacacttatttctcacacttctggaggctaggaagtccaagatcaaggtgcttatagattcagtgtctggtgggggctcacttcctgctttatgagctatgccttctcactgtggtttcacatggtagaaaggggtagggctttctctctggcctcccttacaaaggcaccaaccccattcctgagggctctgccctcacaacgtaaaatttctgtacattctatgccatgctgaagctcattttacaaccctaagctctcaccttaaggtccatacatgctcctaaggaaaatccaccacagcgcactcagtcctcccgtggaggcacctgctgcactctgctgcagtgttcttcctttctaataaactttccttttccaaacctatactgttgtcagtaagttctttcttttttgagacccctccccccaccccaagacatgccagtagtcccagctagttgggatgctgagacaggagatggcaccactgcactccagcctgggcaacagagcgagactcatctcaaaaaaaaaaaaaaaaggatcaaacagtactaaagaccctattataaaagtctttcactcacagtgtccctgaatctccccctccctcccacaaccactgtttacagagccttaaataaacagatgataatgtgttaccttgctcagtccctggcctggagtgctgtggtgccatctggactcactgcagccttgacctcccagactcaagcgagcctaccctctcaacctcctcagtagctgggaccacaggcacatgccatcatgctgggctaatctttgtattttttgtagagaaggaggggttttgccttgttgcccaggctggtcttggactcctagattcaagtgatctgcctgcctcaacctcttaggatcaggggccactgcaatgggctagacatttttttttttgagtcagggtcttactctgttgcctggcctggagtgcagtggtgtggtcatggctcactgcagcctcaaacccctgggttcaagccgtcctcctgtctcagcctcctgaggagctagctgggaccacaaacacaggccactgtgcccagatgatttttgtagagacagggtttctccatgttacccaggctggtctcgaactcctggacttaagcgctccacctgcctcggcctccctaagtgctgtgactacgggtgtgagccaccacatctagcacacctagtgcagtccttctggagagtgggccactcccagccccggagcagccttactcaagccctccctgatcagataggcagcctgacaagttgcactgcctggggaagagcagcaagaaccctgctctggaagttaagagttcccggttctagcccagagctgctttccttactagttattgatcttgccgaagtcatttcctgtctctggctctgtttcccaatctgtaaaattgttactggaaaggggtcccaatctagaccctaagaaaggtgagagagcgaacgggccccggagacaaaaagttcttatctgagcaatttagataaggagcaatctaaggagcaaagaccacatgttgaccatcaaacaggccatctggaggcaaaacttgtctggagaatttagaagtaatcccagcactttggaaggctgaggtagatggatcacttaaggtcaagagttcgagggagcggcagcggcggccaggcacggcgcgaggcgacgccacaggacagcggcggcagcaggaaatgcagcggcggccgcagcagcagcaaaacggatcggtggagaggcgccgccgccgccgggccgggcgtcgcgcgccgaggctcggggggagtcgtcgcagccgccgccaccgctaccgcagccgccgccgccgccgccgcccaggtgactgaggagagaggcacctcctcgctcccgccgccgccggacttcaatgcccagtccccagctcgccagcgtttttcgttggaatatacgttgcacatttatggcgattctgaatgtgagagcagatttctgccaggctgagcacagcgttttcgctgacaagtgagcttggaggttctatgtgccataattaacattgccttgaagacttctggacaccgagactggcctcagaaatagttggctatttatttatttatttatttatttatttatttatttatttatttattttgagacggcgtctcgctctgtcgcccaggctggagtgcagtggcgcgatctcagctcactgcaacctccgcttcctgggttcacgccattctcctgcctcagcctcctgagcagctgggaccacaggcgcccgccactacgcccggctaattttttgtatttttagtagagacggggtttcaccatgttagccaagatggtctcgatctcctgacctcgtgatccacccgccctggcctcccaaagtgctgggattacaggcgtgagccaccgcaccccggcagctttttttttttttttttttttttttttgagagagagtttccctctgtcgcccaggctagagtgcaatggcgcaatctcggctcactgcaagctctgcctcccgggttcaggccattctcctgcttcagcctcctgagcagctgggactacagacgcccgtcactgcgcccggctaattttttgtgtttttagtagagacggggtttcaccgtgttagccaggatggtctcgatttcctgacctcgtgatccgcccgcctcggcctcccaaagtgctgggattacaggcgtgagccaccgcgtccggccagctttttttttttaattgcaagcatatttctttgaatgactccagtaaaattaagcatcaagtaaacaagtggaaagtgacctacacttttaacttgtctcactagtgcctaaatgtagtaaaggctgcttcagttttgtatgtagttgggttttttggagtccgaaggtatccatctgcagaaattgaggcccaaattgaatttggattcaagtggattctaaatactttgcttatcttgaagagagaagcttcataaggaataaacaagttgaatagagaaaacactgattgataataggcattttcatggtctttttaatgttttctgttgttaaacatttcaagatttattgattttttttttcactttccccatcacactcacaggcacgctcacactttttatttgccgtaatgaaccgtctagcccctgtggagatctcctatgagaacatgtgttttctgataactcacaaccctaccaatgctactctcaacaagttcacagaggaacttaagaagtatggagtgacgacttcggtttgagtttgtgatgctacatatgataaagctccagttgaaaaagaaggaatccacgttctagattggccatttgatgatggagctccatcccctaatcagatagtagatgattggttaaacctgttaaacaccaaatttcgtgaagagccaggttgctgtgttgcagtgcattgcgttgtggaattgggaagggcacctgtgctggttgcacttgctttgattgaatgtggaatgaagtacgtagatgcagttcagtttataagacaaaaaagaaggggagtgttaaattccaaacagctgctttacttaagatgcgattacgcttcagagataccaatgggcattgctgtgttcagcagaaagaaatgtaaatgaaggctgacttgattgtggcatttagagggaactcctggtacctggaaatgtgaatctggactcttacctgtgtcatcaaagtagtgatggattcaatactcctcaaccactctcctaatgatcagaacaaaagcaaacaagaaatctctctataaaatgaataaaatgtttaagaaaaaaaaagagttcgagaccagcctggacaacatggtgaaatcccatccctacaaaggttaactgggcttggtggcacgtgcctgtaatcccagctactcaggagactgagacaggagaatggcttgaacctgggtggctgaggttcccgtgagctgagattaaaaaaaaaaatcatacttccctagtatctaaagttgatatctgattccaggcctctttcaactttttttgtttgtttgtttgtttttttgatatggagtctcgctctgtcatccaggctggaatgcaaatggcacgatcttggctcactgcaacttccacctccagcgttcaagcgattctcctgcctcagcttcccaagtagctgggactacaggcgtgtgccaccaagcctggctaactttttttcttttttttttttttgagagggagtcttgctctgtcccccaggctggagtgcagtggtgtgatcttggctcactgcaacctccgcctctccggttcacgccattctcctgccttagcctcccgagtagctgggagtacaggcgctcgccaacacgcccggctaattttttgtatttttagtagagatggagtttcaccgtgttagccaggagggtcttgatctcctgacctcgtatccgcccgtcttggcctcccaaagtgctgggattacaggcgtgagccaccgcgcccagcacctggctaacttttgtatttttagtacagacggggtttcactgtatgttggccaggctggtctcaaacccctgacttgaggtgatctgcaagcctcagcctcccagagtgctgggattacaggcgtaagccaccgctcctggcctaaggttggctatttttatggttatttcttgattatatgataaacaaggggtgggttagtaatgaatttttcagaaaaggggtggggatcccccccaactgaaggttcctccactgtttagaccatatagggtaacttctggacgttgccatggcatttgtaaactgcctggcgctgctaggagtgtctttagcatactaatgcattataattagcgtataatgagcagtgaggacgatcagaggtcaccttcctgtcttggttttggcaggttttgaccagtttctttgctgcattctgttttatcagcggggtcttgtgaccttttatcttgtgctgacctcctgtctcatcctgtgacgaaggcctaacctcctgggaattcagcccagcaggtctctgcctcattttacccagcccctgttcaagatggagtcgctctggttggaaacttctgacaaaatgacagctcctgttatgttgctgctgctgccgccaatggacagcctttaacgtgcccgccagccctgctccaccgccggcctgggctcacatggccccatccctcctcgaacctcctagcctgttagttactcaaatctgcaagctctctgccttctcagggccttcaataaatgcatttcttctgtctggaaggctcttcctttccctcttctagccaattcctattcatccctgagtttcagattaaaagtcacttcctttggaaaccttacttcgctacttcgctacttactgcactacttcgcagcatcacaactatgatggaaatccttacttacgttaaatatctggtttctaggtcacctccctgacggggacggtagggaccgtcttctcgttcatcagtagggaagtagctatggcagtgcctgatacaaaataaactccaaatgtgtatttattagatggttggatggaagttatttgcgtgtgaaagcgcgttttacccgaaggcgctctgtgagggccagcgggtccccttcggccctggagccggggtcacacgctccccaccgcgtgcggtcacgagacgcccccaagggagtatcctggtacccggaagccgcgactcctggccctgagcccgggcttagccttcgggtccacgtggccggaggccggcagctgattggacgcgggccgccccaccccctggccgtcgcgggacccgcaggactgagaccatggaggcggtggcggtggccgcggcggtgggggtccttctcctggccggggccgggggcgcggcaggcgacgaggcccgggaggcggcggccgtgcgggcgctcgtggcccggctgctggggccaggccccgcggccgacttctccgtgtcggtggagcgcgctctggctgccaagccgggcttggacacctacagcctgggcggcggcggcgcggcgcgcgtgcgggtgcgcggctccacgggcgtggcggccgccgcggggctgcaccgctacctgcgcgacttctgtggctgccacgtggcctggtccggctctcagctgcgcctgccgcggccactgccagccgtgccgggggagctgaccgaggccacgcccaacaggtaccgccccgaagcttccccgcgtccgcccgaggcgcttaccccctcccggagccgctgccacccaaatcgggaggctgagcggggagcgctggccggaaggcccagctgcgccgcctccagcagctgtgtggccttgagccagccactctgcctttcagagcctcggctggcccacctgaaaaacggaaagaagacgcctaccgtgcagtgttattgtgaggatttgcacgatgatgggcatagaatttgtggtgcacaattggtgatgagtgaattttcttgccttcctcccccaccttctctttgaacctgcggactgaggaaggacgcctccatcccccaccctacaggcctgtgttccagcgcctgccacactatggagtgatgtgttcacacagctgtcctcccctgcccatctgttagactgtgggggcagggattccccgttccaggaaaacaccgtgcagaggaggggctctggcagtgtggcatgaaagtggaatatgccacccaaatacccgccaggctagagggccctgggagagtgcaggggacgagtgcctcagaagcccagccccggtacctggtctcagctccacctggggtgggtcccagtgtgcagcagaagggccgagtttggagcccctcccctctcctctaggtgggggatgggggatttgttccagggccgtggaccctccagggtgggatgcgcccctgctcatgacactgcccgcaggtaccgctattaccagaatgtgtgcacgcaaagctactctttcgtgtggtgggactgggcccgctgggagcgagagatagactggatggcgctgaatggcatcaacctggcactggcctggagcggccaggaggccatctggcagcgggtgcgtgcccactgtcccttccccaccctcctctatggcgggagccaccgtaggtgttttcacccgccccccagcatgggcgcagtgtctctctctagaagtgctttcagcgtgcacagtggcttgggcctcctaaaaactgaggcttccggccgggcgcggtggctcacgcctgtcatcccagcacttcgggaggcctaggcgggcggatcaggagttcaggagatcgagaccatcctggccaacattgtgaaaccccgtctctactaaaatacaaagaaatagcaacctgggcaacagagcgagactctgtctaaaaaaaaaaaaaaaaaaaactgaggcttccagtttgaggagtggggctccttcccccatctcccctatgcagccaatcacctggtcccttggatccaactcatgggcagctctagatctgcctccctggaagcttctgtgctgcaatggctgctccaggctctgcttaagctcttcacacagttgccctgcccttccatctggcactcttgctccatgaagccttctaaggccttcctgttgggggaaagcccctttgtgccccatctcctcacccatgcgacaaaggcaacacagtgaactcacctactcacaggtctctttcctctgggctgtgggctccttgatggcagcgttcggattttgtctcagtagccctagcacccagcacaaagaagcaatgagtgaatggttgttgaatgaatgaatgaatgaatgaagatgaatatatttctatgtgtgggcccttcttcctcaggtgtacctggccttgggcctgacccaggcagagatcaatgagttctttactggtcctgccttcctggcctgggggcgaatgggcaacctgcacacctgggatggccccctgcccccctcctggcacatcaagcagctttacctgcaggtaaaaggatggaaaagggaaggggcagaatcggtgatagatggtcatgggcccaggaagggtggtattaggccggccccagggctcttaactgaggcggggggctgcgtgtatcctgggagatgagggccttctcataggacagcagtggccatgctcaccacccttccttctgttcctccagcaccgggtcctggaccagatgcgctccttcggcatgaccccagtgctgcctgcattcgcggggcatgttcccgaggctgtcaccaggtgaggttccgctcaccccctccacttagctcagagagggaattttattcccttctagaacatgacttaaaaacttaagctctgggccgggcgcagtggctcacgcctgtaatcccagcactttgggaggccgagttgggcggatcacctgaggtcaggagttcgagaccagcctggccaacatggtgaaaccctgtctctactaaaaatataaaaattagctgggcatggtggcacgcgcctgtaatcccatctacttaggaggctgagacaggagaattgcttaaacctgggaggcagacgttgcagtgagtcaagatcacgccattgcactccagcctgggtgacgagcgaaactctgtctcaaacaaacaaacaagctctggacgtaggcctgggtttgatttctgactctgctactaattagctgtgtgacttcgggcagatgacatgactgctctgtgcctcagtttccttacttgtaaaatgggatctctacccacttcgctgtagggtttgtaattatctctcgatctatctgtgactttgcacagagtgctagcaaatggcagcccttgggagtggcagcaggggtgctccagtgtcccttgtccctcctgttcctctgtgcttcccagccatcctctcacatgtggttgggaaaagtcttcaaggctcacctgagacctcccctccttcaggaagccttgctagtgccccgcatgacctcctttgcacctgctaatgtctggctcccatactctcgtaggacttaatgcatgccagtggcctccctgcccgcctctttgcccccatcaccaggtggcaggaaactcactcattcattcaataaacttggtccagctgtctgaggctgccagaactggctgtgctgggtcctgggaggcggcaagaaaggtgcccaagggcttacccctgataggagagatatgttggctgaaggatacaatgtggggacaaggacaggaatatatgtgggttccgctctcctctgccgggagagaggggcaggaagggctcagggcagagcccagccttgaaaaatgagtgttgcttggacggacgcttggctaatgcttgtaatcctagcgttttgggaggctgaggcgtatggatcacctgcggtcaggagttaaagaccagcctggccaacatggcgaaaccccatctctactaaaagtacaaaaattagccaggcgtggtggcgggctcctgtaatcccagctactcggtaggctgaggcatgagaatctcttgaagccaggggccagagactgcagtgagccgagatcacaccacttcactccagcctgggtgacagagtgagactccgtctcaaaaaaaaaaaaaaaaaaaggaaagaaaattaaacacctcatgttctcactcatagtgggagttgaacaatgagaacaacatggacacaggaaggggaacatcacacaccggggcctttcgcggtgtgggggtcaaggggaggagtagcattgggacagatacttaatgcatgcggggctgaaaacctagatgatgggttgatgggtgcagcaaaccaccatggcacatgtatacctatgcaacaaacctgcatgttctgcacagaactgaactgaaagtataattaaaaaaaaaaaaaaaagctgggtgcggtggcccacacctgtaatcccagcactttgggaggccgagacgggcggatcacaaggtcagcagatcgagaccatcctggctaacacagtgaaactcagtctctactaaaaatacaaaaaattagccgggtgtggtggcgggcacctgtagtcccagctactagggaggctgaggcaggagaatggcatgaacctgggaggcagagcttgcagtgagctgagaatgcgccactgcactccagcctgggggacagagtgagactctgcctcaaaaaaaaaaaaaaaaagaaagaaaaaggagcgttgcttgtttcaggccacaggaaggggagagatagtgaaagtttttcagagaaggtggccagggaaggagaagaaaggactgtaggcagagagcatagcctgtacaaagccatagaggcaagagaaaccaggagctgtagagaagttggcaaggctgttgaacactatggtgaacactatggcggcttccatgaaatatctgagcttttgctccccactagggtgttccctcaggtcaatgtcacgaagatgggcagttggggccactttaactgttcctactcctgctccttccttctggctccggaagaccccatattccccatcatcgggagcctcttcctgcgagagctgatcaaagagtttggcacagaccacatctatggggccgacactttcaatgagatgcagccaccttcctcagagccctcctaccttgccgcagccaccactgccgtctatgaggccatgactgcaggtacagtgcctgggtggggtgggagagccccccagaccctcaaaaagaagggagtagcagatgtcagtaggggtaggcagagggactggaataatgcctcgccataacacacagtacttcatagtttaccaagcacgtgtacacatgcgttgtctcagtgaatcccactgtggttgagaggtgagctctggaagccaacaacctgggtcacacctcgcgctcctatttcctggccgtgtgacttatgactcatgacctccttcccagtgtctcgtttgcttttcctgtaaactgggactacctcataggtagaataacgcctggcccagagcaaaggccactaagagctagctatgaacaaggattttgtttcatctctgcgtggttgctgaagtaggcactgcaggcaggaggtgagtggatgtgcctaaaggcactaagtgcgcatcctgctacaaaactgtgaagccagggctccttcctgccacttaaaggaggagtggagcagagggcgcccaagtcaggaatgacttagtggagaggcgtctgtgttggccaggaagggaacagatcagctcagcctttcttgagcagtactgctccaagtgtgacccaaaaccagcagcagcagcagcagcagcccgagctgtgagatggcaaattctcaggccctacccaagacctgaaggagaagctacattttttttttttttgagacagatttcactctgttgctgaggctggagcacagtggcacaatctcatctcactgcaaccttcgtctcctaggttcaagcgattctcctgcctcagcctcccgagtagctgggactataggcacccgccaccacgcccggcaatttttgtttgttttgagatagagtctcgctctgtcacccaggctggagtgcagtggcacgatctcagttcactgcaacctctgcttcctgagttcaagcgattctcctgcctcagcctcctgagtagctgggattacaggcgccccccaaccacactcggctaatttttgtatttttagtagagacggggtttcgctatgtaggtcaagctggtttcaaactcctgacctcaaatgattcgcccacttcagcctcccaaagtgctgggattacaggtgtgagccaccttgcctggccaatttttgtatttttagtagaaacaggtttcaccatggtggccagactggtctcaaactcctgacctcaggtgaactgcccacctcagcctcccaaagtactggtattacaggcgtgatccactgcgactggccttgattttgtttttgagacagaatcttactctgtcgcccagactggagtgcagtggcacaatctcagctcactgcaacttctgcctcatgggttcaagtgattcttgtgcctctacctcccgagtagccgggattacaggcacctgccattacgctaggctaatttttgtatttttagtatagacagggtttccccacattggccaggctggtctggaactcctgggctcaagtgatccacctgcttcagcccctcagagtactgggattataggtgtgggccaccacgcccattcagaaacctccatgttttaaggagccctctgggtaactctcatgttcacccaagctgctgaaccctgtcctggagttttcagagggacgcgtatgtgccacagagcgtcccgctggtgggggtcatgggaagccatgacctgggatagacagtcgtctgtagagtggggtgaacattccctgggccctctgtttcatcactcctcttctctgttccccctacctcctgtccacagtggatactgaggctgtgtggctgctccaaggctggctcttccagcaccagccgcagttctgggggcccgcccagatcagggctgtgctgggagctgtgccccgtggccgcctcctggttctggacctgtttgctgagagccagcctgtgtatacccgcactgcctccttccagggccagcccttcatctggtgcatgctgcacaactttgggggaaaccatggtctttttggagccctagaggctgtgaacggaggcccagaagctgcccgcctcttccccaactccaccatggtaggcacgggcatggcccccgagggcatcagccagaacgaagtggtctattccctcatggctgagctgggctggcgaaaggacccagtgccagatttggcagcctgggtgaccagctttgccgcccggcggtatggggtctcccacccggacgcaggggcagcgtggaggctactgctccggagtgtgtacaactgctccggggaggcctgcaggggccacaatcgtagcccgctggtcaggcggccgtccctacagatgaataccagcatctggtacaaccgatctgatgtgtttgaggcctggcggctgctgctcacatctgctccctccctggccaccagccccgccttccgctacgacctgctggacctcactcggcaggcagtgcaggagctggtcagcttgtactatgaggaggcaagaagcgcctacctgagcaaggagctggcctccctgttgagggctggaggcgtcctggcctatgagctgctgccggcactggacgaggtgctggctagtgacagccgcttcttgctgggcagctggctagagcaggcccgagcagcggcagtcagtgaggccgaggccgatttctacgagcagaacagccgctaccagctgaccttgtgggggccagaaggcaacatcctggactatgccaacaagcagctggcggggttggtggccaactactacacccctcgctggcggcttttcctggaggcgctggttgacagtgtggcccagggcatccctttccaacagcaccagtttgacaaaaatgtcttccaactggagcaggccttcgttctcagcaagcagaggtaccccagccagccgcgaggagacactgtggacctggccaagaagatcttcctcaaatattacccccgctgggtggccggctcttggtgatagattcgccaccactgggccttgttttccgctaattccagggcagattccagggcccagagctggacagacatcacaggataacccaggcctgggaggaggccccacggcctgctggtggggtctgacctggggggattggagggaaatgacctgccctccaccaccacccaaagtgtgggattaaagtactgttttctttccacttaaactgatgagtcccctgggtctgtcaaaatgagaaggtcactgctgccacgcttgggaggactcagggctatagcatggccctggggtgggacctgttctcccatcccttgcctcacgtccctgtttttgtttgtttgtttgtttgtgacggagccttggtctgttgcccaggcttgagtacaatggcacagtctcggctcactgcaacctccgcctcctgggttcaagcaattcttgtgcctcagcctccccggtagctgggactataggcatgcaccaccacgccaggctaatttttttttttccaagatggagtcttgctctgtcgcccaggttggagtttagtggcaccatattggtttactgcaacctctgcctcccgggttcaagcaattctcctgcctcagtctaccagggagttaggactacgggcctgtgccatcacgcccggctaatttttgtatttttcatagagataaggtttcaccatgttggccaggctggtctttaactcctgaactcaagtgatccacctgcctcggccttccaaagtgctgggattacaggagtgagccaccgtgcccggccacgtctctctttttaacactaatgttaccctgacctttgaacgtagaatgcccttctgttgcaggaaaacctcttttcaaaccatgtttgtcctttgctggcatgccacagcaacagtcaccaacacagaagacttctgtgaccaaatatttggaggattttccccacacacaccaagcagcagacatcagctgggtgtcctccaattcagttccaatgtaatcaaccagagacagcatcagatcccacagggttagggtgcagatccatgagaccaccccctccttcccaacggttacaagtcctgatccctggaacttctgactaactggcttcaagttggagttcccatgacccccttcccctctttggagtcaactcatttgcgacagtgacccacgaaacacagggaaacccttattatgtttattgctttattacagaggaaaaaaatttttttctttcttttttgagacagggtctcactctgtcatccagaatgactgcagtggcaggatctggctccgtcacccaggctggagtgcagtggcatgatctcggctcactacagcctccatccccccaaaccccacgcctcagcgccccaccccgcaagtggctgggactctaagcatacaccaccacacccagctaatttttttgtagtttttgcaaagacggggtctcattctgttgccctggctggtcttgaactcctgagctccagcaatccccttgccttggcctcccaaagtgctgggattacaggcatcagccaccgtgcccaacctcaaaggatattttaaaggatagaaataaacagccatatgaagagatacagacagggcggtctggaagggcccagagcaggagcttctatctccatagagttggggttacatcaccctccaggcacatggatgagttcttcaccttctgtcagcctccacacgttcagctctcagaagcttcccgaaccctgtcctttgggccttttatggagaactccattggctgtccatgactgaagcatggacaactgtgataatgtgattgggcaaaaagggtctgatctaagcccagcaaggccagtccagattctttgggcctttgtgcagcattcctttctccagggtatggggcaaggacccactctggaatgaggatcctacaacccacaatcagattagaatcctgccttgggcagctgaaaagaggacaggagaaggtcaaagagaggaaaggctgttttttgaggcctgaggcgccccaacatgacaacgaaagactgtaaccatggtcatgtgagttatgagctaggaaccctggacgaaaccaacacatatacaatcatctcccacctcccaacacctttactttcacagcctctgcagcaaactgcggtcactataatcgctcctgtggcacagaggcatacccaggggaatctgcccagggggccactctgtgcccacgtgggaacccacatctgcttgtaaagcctcccctccctctgaccagaaacgaggacagtttgttgttccaagcagtgggctcatgtctgttttggctcagaacagggtggggagagcgggccagggacccgcaggagggcttatccttgagattgcgtgggagacacaacaaggggtgggggcccgcaggcggggcggggcgaagcaggtgatatccagcccagagccccagcctctccccacagtctcaccatggcctgcaccgtggtgctcatcaccggctgttcctcaggtattggcctgcacttggcaatacatctggctttggacccatcccagagcttcaaaggtatagataggtagggacagggagggagagaagggaaaagcccttggaggccagaagagaagtcagatcttcctcctctcccaaaacctccagtgtatgccacgttgagggacctgaaaacacagggccggctgtgggaggcggcccgggccctggcatgccctcagggatccctggagaggttgcagctggatgtaaggaactcaagctccctggccgctgcccgggaacgcgtgaccgagggccgtgtggatgtgctgggtgagcctcctggaagcatatgggctcctaggagccttctccgccctgcgttgaaaccaacatgtccccaggcccctggagcatgaggggacaggccgtgctgagggtgatgctgaggcgggctggttgggcctctgtccccgcagtgtgtgacacaggcctgggcctgctggggccgctgggggaggacgctgtggcctctgtactggatgtgaatgtagtaggtactgtgcgggtgctgcaggacttcctgccagacatgaagcggccgggttcgggacgcgtgttggtgactgggagcatgggaggattgatgggtgagtggcagggaccgggcccggagctccagattctttgtgtgcagagctgagccttgaaggcaggctccttagggggtggggtgcaatcagcttggaggggcactgcctgccgggggatgaccccctggccgctgcgcctcaggaacctcatcttcccacccaagggctgcctttcaatgacgtttattgcgccagcaagttcgcgctcgaaggcttatgcgagagtctggcggttctgctgctgccctttggggtccagtgagtcaacacccccgtctcctcaaccctcttaactctgacctagagatgccgagcaccctgtcctgcggaagccgctctggtctctgcccggcttacatttgctgcgtgccaggcacttaggctggagcattggcacgcattgtgccacttgctgacctggctgctgaagtgttggtattgttatggggaagctccagccaagagaggttaggtgactggcccaaggtcatgcagcggccggggatcccgccaggttcgaattctgacaccagggctacctggcagcctcagatgggtttgggagggctgtcgagcaataacccgctattcaaatgttctggttatccccagcgctctttccaccttcgggacgcagcggtgctgttctgggtcgtggccagggccggggtcggggccggtgctggggcaggagatgggacttggcgcctgggtcgcctccgtccctgcccacttgcggctctcgggccagcagcgtgagcctgatcgagtgcggccctgtggacaccgccttcatgcagaaggtgttgggcggtcccgaccaggtgatggaccgcacgaacacccggaccttccgcctcttgcactaatacctccaccacagcaaggagatctaccgcgaggaggcgcagcaccctgaggaggtggtgaaggtgagcggggggcgggactccgggagcgggggcggtgcgtcgtcctgcgcgcagcccgggccagagctcctctcccgccgccgcaggtcttcctcaccgctatgcgcgccccgaagccgaccctgcgctacttcacaaccaggcgcttcctgcaccagctgctgatgcgcctggacgacccctttggcttcgactacgccgccgccatgcaccgggacgtgttcgccgacgatcccgcagaggccgaggctggggccggggctggggccgaggccgggggcggggccggtgggatgggagaccctgagctcagcgatcctctggccgccccgcaagaaaggctccgtcagccactgtctcccgcgccctcctttgtctcctgggcctgtgcggtccctggggatgggacggcggtgacggctgtggatggctaattaagacagatcacgttagcccgttatatctgcgcggctaggcgcgatggctgtcgcctataatcccagagctttggaaggccgaggcaggaggatcgctccaggccaggagttccagaccagcctgagcaacatagtgagacaccccatctctaaaataaaaaaattagcacagtggcaccattccttgagctcaggagttggaggctgcagtgggcatgatcgagctactgctctccagcttgggcgatagagtgagacactgtcaattaattaatctaatcaaccaaccaacccaacaacccagaaaccaaggtccagaaagaagccagcccaggatcatgcctcaagtccacagtaaagcccagacacagtcactggatacccaaggggcatctgcaggacgagttaggtgggacttgggttggggtagagtcaggttgtgacctgcactccattagccatgagacctcaggcaagttccttgctttctctgagtgctttcctttcctttcccttttcttttcttttttgtttttcttttgttttgagacggagtttcactcttgttgcccagcctggagtgcaatagcgcggtctcagttcaccacaacctctgcctcccgggttcaagtgtagctaggattgcaggcatgtgccaccacgcccagctaattttgtatttttagtagagacgaggtttctccatgttggtcagactggtcttggactcccgacctcaggtgatccgcccgccctggcctctcagagtgctgggattacaggcatgacccaccccatccggccctctgagtctttcttatctgtaaaatgggtataataatacctatctaatcggttttagtaatggtggagataatgcctgaaagtgctagtatagaggtttaatacccagcaaggactgttattagaatgaatagtaatatgactactgtcacattttgcaaatgtgtaaagaagaaagagggctaagtgaatcaaagggagacagccccactcaccctgttctgccccagaggactgagcgatccccaccatctgggaagctgcctcaccaggaggtccagctggggctacaggactggctactttgctacaatggcccatctttcctgagcccagtggagggtcccaggggggcagaagtcattgataggggccagtagggttgtagagccactgtctgaacttctgtggaggtctggtgcaggggaggtgtgaacagataggaggctaggtgaggatgcagcagaggaagggggcaggagtgccccaggagggggcggtaccgaggcagggattcagctgggtctgagagggagggaaggctgagggggatggccctttggagtgggcagggacatgaccacagaaagcctgggaagtggaaacagacaggagcctgctggagctcttggagctttgtgtggggcactaggggaaggaggcaggcactccaccctgacctgcccctacctctggatgagggtcttctctgcctgttggatgatgtgctgcccctgctcttggaggaagaggcctcccagccaccccctcctgccagtcgccttgccctgctgacccagacagatctgctatccctacagcatccaggaaggccacagggagggggcccaggtggcatgggtttctgaggcctgggatctgctctcagtcccgctctcgccaaccccctttgcccctctgtgacagtgtgtgtacatatgcgtgcatgtgtgtacctgtgtggtgtggctcacaaggtcacccctgggggtgggataataagaggtaaagtgtgaccccctctcttccgtacattcattttttcaagcttgtgaatattcacattgttaatataatcttctgcagtcccatgacttcgaatagcacttagatgccgatgacccccccaccaaagaaaccccactgtctcccacagactccaggtctgtatctccaactgcctactcaatacaacacgtccacctgatacaatgaacttaatgtgtctaaaccccaattccacatttccagtcctcctaccggctcctcccccagtcttctctactttactatatgacaactccatttttcccaatactggttttaaaaaccctggagtagtccttgactccagtctctctcacctttcaaccaattcagcagcaaatactgacagctctacctttgctcatcaaagcatatccccaaatcaccctattccagactgcacactgtcatctctcccttcaattacagcagtagcctcctaactagttttcttgattccactcctgcccatcagcagtgaaattaccccagagcagttaaaatgatcttttaggatgggcacagtggctcacgcctgtaataccagcactttgggaggtggaggctggctgatccccttaggttgggagttcaagaccatcctcaccaacagggagaaaccccatctctactaaaaatacaaaaattagccggatgtggtgggacgtgtctgtaatcccaactacttgggaggctgagacaggagaactgcttgaacccgggaggtggaggttgcagtgagccagaatcgtgccacagcactccagcctgggcaagaagcgcgaaactccgtctcaaaataaaataatcttctaaaaatgacagggccaggtggggtggcacttttttataatccgagcactttgggaggctgaggtgggcagatcgcttgacatcaggggtttgagaccagcctggccaacatggtgaaactccgtctctactaaaaatactaaaaattagctgggcgtggtggcgggtgcctgtaatcccagctactcgggaggctgatgcaggagaatcgcctgaaccaggcagatgcaggatgcagtgagccaagattaagacactgcactccaacctaagcaatactttgtctcaaaaataaaaaaaagcctgggaaacaaagtgagaccccgtctctacaaaaaagtcaaaaaattagctgggtatggtggcagtgatggcacacacctgtagtcccggctacttgggaagctttttaatattttttgcagagaccgggtctcactctgttacctggcctggtcttgaactcctgggctccaacaatcccctttcctgggcctcccaaagtgctgggattacaggcatgagccaccgtgcccagcctcaaagcatattttaaaggatagaaataaacagccatatgaagagatacagacagggcggtctggaagggtccagagcaggagcttctatctccatagagttggggttacgtcaccctctgggcacattctgtcagcctccacacgttcagccctcagaagctcccgaaccctgtcctttgggccttttatggagaactccattggctgtccatgactgaagcatggacaactgtgataatgtgattgggcaaaaagggtctgatctaagcccagcaaggccagtccagattctttgggcctttgtgcagcattcctttctccagggtatggggcaaggacccactctggaatgaggatcctacaacccacaatcagattagagtcctgccttgggcagctgaaaagaggacaggagaaggtcagagagacgaaaggctgttttttgaggcctgaggcaccccaacatgacaacgtaagactgtaaccatggtcatgtgagttatgagctaggaaccctggacgaaaccagcacatatacaatcatctcccacctcccaacgcctttactttcacagcctctgcagcaaactgcggtcactataatcgctcctgtggcacagaggcatacccaggggaatctgcccagggggccactctgtgcccacgtgggaacccacacctgcttgtaaagcctcccctccctctgaccagcaaccaggacagtttgttgttccaagcagtgggctcatgtctgttttggctcagaacagggtggggagagcgggccagggacccgcaggaaggcttatccttgagattgcgtgggagacacaacaaggggtgggggcccgcaggcggggcggggcgaagcaggtgatatcaagcccagagccccagcctctccccacagtctcaccatggcccgcaccgtggtgctcatcaccggctgttcctcgggcatcggcctgcacttggccgtacgtctggcttcagatccatcccagagcttcaaaggtatagataggcagggacagggagggagagaagggaggagcccttggaggccagaagggaagtcagatcttcctcctctcccaaaacctccagtgtatgccacgttgagggacctgaaaacacagggccggctgtgggaggcggcccgggccctggcatgccctccgggatccctggagacgttgcagctggacgtaagggactcaaaatccgtggccgctgcccgggaacgcgtgactgagggccgcgtggacgtgctgggtgagcctcctggaagcatatgggctcctaggagccttctccgccctgcgttgaaaccaacatgttcccaggcccagggagcacgaggggacaggccgtgctgagggtgatgctgaggcgggctggtcgggcctcttgtctccgcagtgtgtaacgcaggcctgggcctgctggggccgctggaggcgctgggggaggacgccgtggcctctgtgctggacgtgaatgtagtagggactgtgcggatgctgcaggccttcctgccagacatgaagaggcgcggttcgggacgcgtgttggtgaccgggagcgtgggaggattgatgggtgagtggtagggagtggcctcggcagctccagattctttgtgtgcggagctgagccttgaaggcaggttccgcggggggggtggagtggggtgccgtcagcttggaggggcaccgtctgcccggggatgaccccctggccgctgcgcctcaggaacctcgtctccccacctaagggctgcctttcaatgacgtttattgcgccagcaagttcgcgctcgaaggcttatgcgagagtctggcggttctgctgctgccctttggggtccagtgagtcaacacccccgttccccgaaccctcttaactctgacctagagacgccgagcaccctgtcctgcgggagccgctctggggcgatctccctggccctctctgcccggctcacattagctgtgtgccaggcacttgggctgggcgcatggcacgcattgtgccacctgctgacctagctgctgaagtgttggtattgttatggggaagctccagcccagagaggttaggtgactggcccaaggtcacacagcggccagggaccccgctagattcgaatcctgacaccagggctcccttgtagcctcagatggatttgggagggctgctccggcaggaacccgcgtttcaaatgttctggttatccccagcgccctttccgcctcacttcccagcgcagcggtgctgctcgcggtcgggggccgggacgtggttggggctgggactggggttggggctgggactggggcctggctggcgtccgccccctcccactcgttgctctccggccagcagcttgagcctgatcgagtgcggcccagtgcacaccgccttcatgga

SEQ ID NO: 415 - DNA, 127092 bp, Homo sapiens
tttgtctaattgctcttttgctagtcaatgtaatgcctccagtttttgctgaggaggcggctactgatcaacccacacaggtttttgagttttccatttcaatgggatgggctttggaggctcaacagtggccgcccctaaaaagagtacccaattccttttcggtcaagtttaactgaagcttcaattggctgagttattccatcctcattctttcctaatgtttttccaggagtataccccaacttagtcatcatgctttgactctctgaactgtaaatcatagagggaatggtgatttccgtaccccactgttgtaacaaatcttttccccacaaattaatgggaatggcagtaattataggttggatggtgccttcctgtccatctggtactaaacagtgtaaaattgtaacactctgataaacttcagatgccatgcctattccaattaaacccatagaagctctctgtttgggccatgtttttggccactgatccagggctgtaacagaaatattagcgcctgtatcgacaagtccttcaaagagttttccctgaatcgttattgtgcacacaggtctattttcagaaacttgacttacccaataagttgcttttcctttgctatcagtgctgccgaaaccaccttctctttttactgtactttctcctacttaggtaataacaacaattaggtaataaggtaataacaacaattgagcaattctctctgcctggcttgcactccaaggaatactagaactaataaccaattgaatttctcccacaaaatcggaatctatcactccagtataaatttgaactccttttaaatttagactaaatctccctaaaacaagtccaactgttacctcaggtaaagggccaaatactccagagggcaccttttgaggtggttcccctggaagcagagacacagctctggtgcaacataaatctaaagcagcgccccctgttgtaactggcgccaattatgttactgtggtggtcacttgagggattaagggcactggtgcccactgacggacaaactgctggagagggaatgccccagtttggagtggggcctgaggctggcccctcttcccatttcccaattgcgcctgcaagggttggccattttcatcaaatttggagtgacaccgtttagcccaacatttacccttctggcacctgggacataagccaggtggctcctttgtttgattagatctggattgtttgtttgatttgttcttatattccttttttgtatttccaaattgcccacagttataacaattgcctgaaaagtttttcactggatctcccacctttgatcctgccatgttttgagccattatcatagccttatgcatgattccaccaatctatcacatgccctgatatactcattgattacatcaactcccaccagaacctttcctttcacagagcgaataggtgattgacagtcagggttggcattttcataagccaagaattctataatcaccttcctggcactttcatcagtgagagccttctgagctgcatcttgaagaggagcaataaaatcaggatacggttcttttgagccttgtctgacagaattaaaagagggataagtagttcccgggtcctgaattttttcccatgccctcaagcaacaattgcgaatttgctcaacggcatcatcctgaagcactaattgttgtacagttcctcattggcccccaactcccaacagttgttcaagtgaaatggcaacaacaggattagcagcacggtttttttgatcttgattttgagcctcatcggtccaccaacttttaaattgaagaaattgggagggcgaaagagtagcttttgctaaaatctcccaatcgtccggggccaatcgcttgtcctgagttactgagtgtaatagtgactggacagaaggcgaattgggaccttactgaccaacagctgctttgagatctttaagcagcttaaaagaaaatggttcccataccgcctgatgggcaccaccctgctgctgtgggagttccaaaactactggaaactgccaggcatcgggatctccagctaacctagcctgccgaataaccatttgaaatggtgattcattgacattaggtggcagtgcagccctatgctgtactggtgctgcaaaacgtgttcttgattcctgagcccctaatttatccattcgtgaaacagggcaaattggagattcaaacctccaaggctccaggttacgttgccttattggaggtggccactccggatgatcccaatgaggagccaaagattcctcaaggcccttctttgttttaaacatattggcataaatagcttctctattttaggagcagctggaggtcccacatgctcctcaaaagaaattaagtcatctccaggtttgtctgtactttcctcaaaatcttcttcactatcctctcctccttcaacttcctttatatttatattggcggcagcaccgccttcctccgctggaattctttctgccggaggataaacctcgttttccatttgaaacggttccaaggctgctttaaccatagcccagtctgaccagaccgttagaagaataagttttccttccttatgaacttgttttaaggcaattccaacctgctcccaatcttttaaatccatggtaccttattcaggaaaccaagggcaatactgctctactgtttgaaacagagtaatcaagttttctgtgctagcctttattacccccctctttaagaggagtttgataaagtgtaagtaagcagagtgcttacttcccgattgtcccatggtgtccctggaatactccgagcacacaagcttaccgcaaggccgaccacacgttcttgggagtccctcgacagactggtctccgcaatgaccatgctcaggtgtaactccacctgggtacaaggagcccacactgggtgccaaagatgtaggggaaccagcccgctacaccacatgcgtgttctccccttcccggtggaaatgaaggaatgagaaaagaaataaagacacaaagttcaagagttaacaaaagtgggtccagggttccatcacaacacggaaactgcgaaggccttgagctctggattccactgatgtttattgagtacaattcctttgatcctatgggctgagggtgggcagatggttgggtgatcatagagtgaccatggggagaggtggcagaggggcttaacagaacaggatgtgaaagcagatagcccgtcagaccacaggcctgtgcatcaaaggagtggtccactccaagcaccatcagcagagcagcagagctctccgcctctgggaacgagcgagagatagaagacttcctcctcatctctaccgcagaggacttctcctcttttacaagcagcctcctgctgttcccttctggggaatggagcaggggtcgcttcccttcccacgagacctttgttcagggactcaagtgggaggttgagcaataagcaagctttcttgcttagaggctccgcacacttcctgcggttgtttgttccactctgtggtcagtcaagcaagctcaccgcctgattcttatattgttggactaagcacaagctattcttatgattcatgactatattaataaagcactattctaaagcatatattgttaatccttaaacaggcacactgtacgctggccctcgactacctcggcccacatccaagcccctgttttgacccacaaacctctcctctataccagtgtgtttcacccgctatcagagttttacttgtttccttatctagattggggagagtcttggatagaccggcctgccatccaacgtccttggtttttagccctggaaattatttagttcttctggtaaggagagggcattttctcttacctggttaatctgaattcacgtgtgttttgctagttctcccctgactttgggatctttctcatggaaggagaaatgcaatgtggaagcctttttacggtaaaataaaaaattataaggccaaggtgggtggatcacaaggtcaggagatcgagaccaccctggctaacacgttgaaactccatctctgctaaaaatacaaaaaattagccaagcgtggtggcgggtgcctgtagtcccagctacttgggaggctgaggcaggagaatggcttgaacccgggaggcgcaggttgtagtgagctgaaatcgtgccactgcactccagcgtgggcgacagagcgagactctgtctcaaaaaaaaaaaaaattataatatatacagctgtagctttcctacataatgccgtgaatttaacatgaatcattgtaaccccaatcatgccacatactcctctgctagtccgtatggatgcatattacaaatctagttgtcacctgcagatctctttatttctgtgaataaaaacttatttgacccagaaaccaacttttataaaatcactccagattattccttataaccatgataattttgagtccttatttcatatcattttgttttgattaacagcttttttaaagtgaaagctgaggtttaattttcatgcctttctaacatttttcctatgaattaggaaacaaaatctgtatcagcccatatttccatatttttggaactccctcacctaattatccaatttttctacttaattaccaacatatatctagttacatagttctggtttaactgttttggtatagtgctggtgggaaacaaggaaaaagatgtggattattttccttgtagttttaaaaaatggttactcatatctctccgtttaaacctctccaacttggtgtgtcttgggaaggaagcaatttactcaagattttactacatgattgcagctttgaccacattttcagtgaatagagaagatgacgtaaaaacatacatacaagaaaaatacaggaagaatcatgtagtaatcacaactctgtagaagtaaagccatgtgaaaactgatgaaatgcaactatagatgaaattgtcagaatcacgaaggttacatccattaaatgagtgatttttgaaagaaaagaacataaattggttatgaaggaagaggcagttcagaccgttacaaacgttaatattgtatgtcgacggcagtaattaggtattttcaaatctaataataaagaatcaaaactaggcagtaatgagagatgttctgataattagatctggggaaaacagagcaaagtaaaaagagccttgaaacattacttacgcatgtggatttgatagaattcgttgacataattatataatggctggttgattagattatatacatcaacttttaagtttttgagcaaaagagttatgggagaaaaatctccctccccaaactcccgaggatgcttggcaatcaatgtcaggagacatttttggtttttacaatggacaggggtttgctctaggtatacagtgggtagaggccagggatgttgcggaacctcccggaacgcacagaaccgccccacaacaagaatcacccagcccaaactgtcaatagtatcaaggttaagaaactctgggctagattaaaaggtagagaagttaaccgtgctacaatttaaccaaaaggtgtaagaactaggtcagaggcctccaattagtcctttgtttggcatgaccagtctcttcttccattaagttacccagaaagccaagttatatttttcaggaatattcaaaaattaattttacgttctgctcttaataaatttggggtttatacccattaaaatggatgagtcgcagaaacacaatgttgaatgaaaaaagcaagtaaagcaaaaatacattcagtatgatatcatttatataaagcttgaaaacaagcaaaataaaacatattatttagggatatccatagttacatgaataaaatgaaggaattcaataacattgaattccggatagtatttatgtctgcaaagaggaaagagtttgaagaaaatgtggcagggagcagtccttaaacatcttaagttcttttttttttttttgtttttttgacagagtcttgctctgtcaccaggctggagtgcagtggcacaatctcggttcactgcaacctctgcctcccgggctcaagtgatattgtcctgcctcaacctacctgggattacaggctcgcaccaccacgtctggctaatttttgtagttgtagtagcagcggggtttcgccacgttgccttgtctcaaactcctgacctcaaatgatccaactgcctcgggctcccaaagtgctgggattacaggcataagccactgtacccagacacgttttgattaaattctattttcaaagttaggttgtgggttcttgagtgtttcgctcgttattgtactttatgtatgcatgtatgtatgtatgtagaaacagtttccttaagttcctcaggctggtctggagctcctggcctcaagtgatcttccagcttcagcctcccaagtagctgagattacaggcatataatgcgcccagttgtcagtattgtactatagagtttacatgtatgttatatattcttttgggtgtatcaaaaaatcacataataaaaacaaataacatgcagttataaagtagtggatttgtccctgaagatttttcctttaagttctgtcaccatctgcaggttaaaactaggtattgcagaaaacttgtttttcaaagattaaaaagtacaaacggctggatttctgttacagacatgcttacaatccatctgtggataaggagcatacagaatacattaaagagataaacattatagcaccaagtgttttgttttttttttgagacagagtctcgctcaggctggaatgcaatggtgtgacctgggctcactgcaacctccacctcctaggttcaagcaattctcctgcctcagcctcctgagtagctgggattatagtcacatgccatcacacccggctaatttttgtatttttagtagagacggggtttcactatgttggtcaggctggtctcgaactcctgacatcatgatccacgcgcctcggcctcccaaagtgctgggattacaggcatgagccaccgtgcccggctgtgttatcttataagtaccacctggttagtgtcctaccaaatatcaagaaacagaaatagtattttcacatcataacaactgatttagtttatgtgaataaaaatttaaatcccttactttattcatcctgctactaccttaggccaagccttcattacttcatgacaggttggcacctgttctccttgtcttcttttcctagtctttacaaaacattgccactagattgaagtcttcaaataaccatttcattacagcattgacctcttccaaagtctcaaatggtttcacactaactgaagaacaaagtccacactctttagataagtagttgactttctatagtttggccccaacctggtaataaaccttgccttctcccacctccccatcacttaccatatataaatcctctacttcagccagtctgttttttgtccattgcttactctggatgtgtgatctgtgttcttggtatatcccacttccttgaacatcattctgcaatttggaacttccaccccctgcatatttaatacatgtgttaggttgttctcttgaatgtggaaaactgaaaggcagtttcaatgtttatctcttagaggccattcttctgtttcctatctacatttccacagactgctgcccctaatttcatcctacctataaatcctagagctatcattatctctgagacaaaacatccctattttaaaaatctaaattaccacagcaatcagtgtctacatcatttgtttggcatagtgacggactattaacactaagtcgattcattctgataaagtttgtttctaaaaatagatgttaaatttctgaaagccaggtataattttatcgcttcttgttttttttctttccttcttcccttacaaagatcagtaatgctcatatttgagtttgagatccccttttcaatgtaaatatttctcaaattcctcttacctcccaacaaacaatagtattgacattctggggcttcataaattcagaaaacatcatgactagtagatattataatttcatgcttttgaatttattagaattgttttaatgataacagcttctacatttcaatgtaaatatttctcaaattcctcctacctcctaataaacaatagtattgacattctggagcttcataaattcagaaaacataatgactagtacgtattataatttcacgcttttgaatttattagaattgttttaatgataacagcttctacatacgtttaataataatacatatgtataaagcaaaataatgatgatagctaatatttcgggcctcaacatatactagtgtttttatatgcgttgtatttaattaaaaaaaatcttaaaggaatcacatagacctccgtttaaatttaggctctaccacttgcagctgctacaagtttgatttatataatctttcattgccaaaacgggtcagattcagaaccagcctcttcagggtaactgtgaggatcaagaaaatcacaacagccgaagtgctttacagtgtgcctggcataaaacaaactctgagaacattttttaaaaaatcctttcaaggtaggcagtatcattccttccccctcatttcatagatggggcaattaaggctcagaaaggcacgtcgcttgtccaggatcttggagtggtggaattaggatagggcattctggactacaataaacacctgagcgtttagctgctgtgttctgagctcccacagcactttttcttacaacacaaactttatttacatcacactccacttccgcatccttcactaaaatatgagctcttcaagggcagggactatatttttgctaccgcagtagttagcgatacacacacagaatatgaggaaaaagtgtctgaccaacgatcaatgcactcacgactgaacctacggtggcagattgcagtgggatagaagagctttatgtgaattgcgtactgagatgcagacctactattttgggaacaatttgtttttgttgttgaaacccagaatgcaattcttctttttacctttattttgcttaaaaagttattccataattataaactgcgtaaaactagaagaatgcccttgcactcaactaaaactgacaggtgttttacctttccagtcaggcacattgaaggccttgtgactttattgatttttgttttttaaagggaggacctgccaatttattaatcttaatagagctgtaacaggagagtataaataaaaagatagttcagagaaaatttactgaaattaagtttggattaaaatcatctggctcttttaaggaaaagggacattaaccaaaagtggcgttaactatcaacaatatttatgattctctcactcagtagatacataatgacgtctggcaaattgtttaacttccgtggaacaatcccctcatatgtaaaatcaggaggttggactacattgtaagtgtccttttgtttccacctcttcgtgaccgaatgtggggtgaggaaggggcaaaaaagcgatcccggtcttggctccttcttccggcacgggccggagctgacacccccacggaaaaccgcacagcgcctccgctctttctccacgggctgagggatcaatgcacttccgcataggcctagggccccacgctccgcgatcagcgccggaagcgcacggcatgctgggatttgtagtcctccacctgtggccggcaggcgtttagaacgcgaggtctagttggcattctgggatacatagttcctgggcgggtgggggcggattcgttggtgtaatctcttttcggcttaaagagccagaagcgacaccacagactccggcgggtcacatgactccagtctagctcgcattgcggctcccgcccgggcgagttctcgcccccgcgcggccgttgccgaggagacggcgcatgtcccgccgcgcgttgccccctctgcagtacccccgcccctcttctcccaccacaatgagatcctaagatggcggtggctgcggcggttggcgctgcgtagctgaggtcgaaaaggcggccactggggccgaggcagccaggaaacgtgtgggcctctctgctgcggtctccgagggccgaccgctgccggcggcgggtcgtgggggctgactgtcgctctgcctttgacaggagaggctgcttcttgtagaggtaatgcctgcgcgtccccagcccttggcaacctagggcggcgcgccccagaggcgggagagtaacggctccgggacactcggccctgttgggtctggccacgggcccacgcctcctctgtaggttcccgggtcttcctgccccgggcttcccgtgccctaggcggtcagtccgcccgctccctcaggactgatcgccgggatccccgggtgagcacctcgcgacgcgttggtgattgcaggactcccttcttgcctcctcgcccctcctgctggccctgtcggggaggctgttctgcgtcccggtggctccggctataccccttgcgggcggaggaagcggagcggggactctggtttgggtgctaggggcactgggtcgagttcttagagaaacaggccttggtggccatagttcttccccgcgttccctctgtggaactctcggtgtccagagtttggggtgtagaagggcggatgaggagcgacgcgactctgaagagttgcagttgggctgtgagctgcaggatttccgccgtctctggtgctgtgggagccgatgggccgggggaggcgttcctgggaaggttaatggagtaattattgccccttctttctcccttcctacctatctagttagaattgggcctagaaccgggaaagactaaatgccaagtgggactgggggaaacgttgtttggtttacagaaactggcgtttggggattaggccccgccagggaggctgggcgcgccaactttgcatccctcagcctactccccaggaactcgcctggtttaattttttttgttttgttttgtttttttgagcgagttgaggtctgtattgtgtgtcttacgggtgacggttcgtgtttgggcgctggaaggagcgggctttctgggcgcccctaccacccccgccccataaccgctttccagactccgcctgctggtgttctctggttaccggagtgggtgttgcagagcctcgggtgcacctgctcctttctttccctagcaccttcctggtgaggacccctgaacaccaatataatacagagtttttgaattgaaggtaaacctggtatttatgtagtgacgaggttattttattatgaagtacagtagcttttaaatgagcaaacatttttaaaatcatcggatatacgaggttgttacatagtttgagtaacaggaagctcgatcaatcagaggagtaaactttggcatagactattaaaggatagttagggctaaccatctttgttacactgttccgaaatagatatcactttgctgtttggtaagatttcagaagtttaggggatttaagcatttatgcatatcacactattttccaaaagaattgaggtaacttaaatttaaaatatgaataagttatatttttccccttcttttgatctttctaaacatactttagaccaaaactgaagtattttttattctgtatttcatagcgtaagtaatttacttaagtgatacatatttttaatcctaattaggaaacagctttgaagtgtggagcgggaaaggagcagtttctgagctgcaaaaactagtttctaaacaggtaatttgacattattatctgtattatcctttgtattagagttggagaagactttatggtggacactgctgtcacagttacagtgcatgactgaggatcctctctgcttagtaaacaaactttctgggttcaccgccctgtttgctctgcttttcggcgtgctgctttggcctgccggtatatctttgttcggaaaggccctgtcattcctaattattaattactagaatggtttatgcagtaccgtttgaaatttatttgtcttcacagaattttttcaacctgtttgaatttgtcctataactggatagcctctctttccaaatccatttaatctcaagttctctcctacaacattcctattaattggctgttcatgaactctacttgtcgaacttgttataccttgaccgaaatttagttgtctaaaattactttattattattttttgtacttcgatctccctttcctggtataaagttacttgaaacattacttttagcgcatagtacattgtcacatgcaagtgacataaaggtattctctgtccagcagaataaagtcagtgttgtagaatgtaagttcactaggagaagttcaataattgtttgcaaagggcagtttggaaaaatggctaaaagataattagaagtttgttaaaagctttttagaaataattgctcttcagaaaaaaacctcagaaataaataacctaaatttaattctactcttaaaattttaagaaagttcattttgaaagttttgtagaaattggctgggcgcagtggctcacgcctgtaatcccagcactttgggaggccgaggtgggcggatgacgaggtcaggagatcaagaccatccggctaacatggtgaaaccccatctctactaaaaatacaaaaaagattagccaggcgtggtggcgggcacctgtagtcccagctactctggaggcagaggcaggagaatggcgtgaacctgggagcaggaggttgcagtgagccaagattgtgccactgcaccccagcctaggcaacagagtgtgactccgtctcaaaaaaaaagaaacttttgtagaaatcaatatatattcttgctttctacaaaagcagacagatttttattttatagctctcctatgaggacctgaaatgagactgtcatgagaaaatacgaataggtagttgatgtatatcttaattataattctcagtgggtttttttttttttaaactggaagactaacaaaacagggcaagaaaaatggaactcaagggaaaggtcacatgtgaatgtgtgtgttagagttgttaatactacagtgattgctgtatggtgggctttagtaaaataaacaataattacaaaattagttataagattttccttttagcacattggggaagatgatggataagacgaataaaaataaagggtaattgagttaacttaaattggaagacctgggttttttcaataggagatttggccatttttttctgaaggaggaaagtggatttgagacttggagaaactagtaaggctgtgagattcacagtacagaactaagaagacaaccagaaatacctatcagtactttcatttttacggatttgagtgctaggcaacgtgctatgtaatgactactacagataaaacagtgtgcaaaacagacagggtgcctttcttcatggagtaaatttacattttaaaagtatctatgtgtatgtagagtgtagtatatcttaatagtgatcacaggcaatgccattttatgatcatttccccactttttgacagcttgagaatagtagcagagaaaacagacagtggagtttagccagaattgagtcgacacagtacgcaagtaggtgaggaagtgaaggatgctagctagcaaggcatttttgcaatgacttagttgggtttgggtttgagtaaagaatcaagggattgatggatttagggagagagaaacgatcaaggggctggtagtattcaggaaggctaagagcagtttcagcaggaatcaagtgagagaagtagaatgcaaaaacttatgatcagaaagaggaacttcagaagttcaggatcctgaacaaattatcagttcagtattggaatagagaagatgagatggatattggaattgaggccagagtcctagaaaagtcattgcaagtgtttagttcatgcaagcagggaatgaagtagaaagtgaaaccatgcgccagttactgtcaggaaaagtacaggcatatcttggatattttcagaggtgattatgagtaatttaatgccatttgagaaaaaaataatttttttcgttactgatcactttgatttttttttttttttttttggagacagagtcttgctctgttgtccaggctggagtgcagtggcattatcttggcttactgcatccctctcctcccgagttcaagcaattgattctccttactcagcctaccaaacagctgggattacaggaacgccccaccacacgtggctaatatttgcgtttttagtagaggcggagtttcgccatgttgaccaggcgaatcaagtgatccgcctgcctcagcttcccaaagtggtgggatcacaagtgtgagccactgcacccagcctgattatttgattactttgaatttcttctttaccttatattcttatttcaaaggtaaactgtagtcataggtattttcatggtaattaatactgtgatattctactgtaatatgtctctatagttagaatcctgcaacgggatgttcttttttttggcgatggagtcttgctctggcacccactggagtgcagcagcgcagtcttggctcactgcaacctctgcctcccaggttcaagtgattctcctgcctcagcctccctagtagctgggattacagacgcgtgccaccacgtccgactaatttttgtatttttaatatagatggggttttaacatgttgatcaggctagtcttcaactcctgacctcgtgatccgcccgcctcagcttccctaagtcctgggattacaagcgtgagccaccgcgcccagcctaacaggattttcttaaaaaaaaaaaaaaaaaaaagtcattgaaagtagcttaaaattgccatagtatattttcatttttgtgtctttgtaaaaaaaaaaaaaaaaccactaaggctgttaaaaatagctaaatgaaacttgaaagtaacagtttcaacttcgtttagtaaggcatagcatgagtagaagtgcgtgtttaaagtagaaggattttatttttatccccgttcagctacccgtagtactgtcatcaatcacttctaccaattgttttcctacagtttcaactttcttatcttactgtctttctgtttaacttgcatggcaaaatttcaaccttgggtggattcagtggagtgtttatattgagggatatgagcactgctggaaaaaaatatctgtagtatgtgttatatgagtgaatagtctctcgtttccctgagtccgtagtgctgcccacggtcattctccattccctacttttctacgctctctcagacactgctgtctcaccctcacatttaatgtacagtccttcctacttcacaacacttaggaacacctttggtttcctaccaccacatctgctaagcagcctccaacccattccatcctttcttggtttttttcaattaaagagatgttcttcttcctctctaaagctaatcatttgtcttttgctctagaccccaatggcccccgctttctcagagcccacatgctagttgcttatctcctttctcttctgcatttttagtatctccctcttttttttttttttttttttttttttttaaagtgaggcggagtttctctcttgttgcccaggctgagtgcaatggcactatctccgctcactgtaacctctgcctcccgggttcaaacgattctcctgcctcagcctctcttgtagctgggattacaggcatgtgccaccatacctggctaatttttgtatttttagtggaaacagggtttcgcagtttggaacaggctggtctcaaactcctgaccttagatgactcacccacctcagcctcccacagtgctggtattacaggcgtgagccaccgcacccgaccagtatctccctccttaccaacaaattgtaaacgtactcaagatacttctattttaataaaactttccttatgaccgtctgtgcttgcttctcatcataggctgattccttaaaaatattagctaatgactttctttattttttccctcttccttccaataatacattccagttatggaattgaccctcactacccctgctgaaatttctcaccaaagtcaacagtaaccttgttgctaaatctaggaggatacttctcagtacttctcttatctggcaaggtaactgtttggtttcttatcacattctacttgatacacttttccccttttggcaggctctcctggtttccctcctgtctttctgtaccttattagtgtattagcgtgtccttttcctctgcctctctatttaataccagtgtatttaagatctggtcttctcttactctttatcgtctccctgagtcctctgtcccactttttgagtggatgactctccagcccagatttctctgttgagagatagatcgctatttgtcaaccggacaattttattgggtgtattataggcacatcaaactctccatttctaaaacttgaactcatcatcatcctctctcaacaaagaaaacttgtttcttttctgatcagtttaactgtgtgtcacatacccagtttctagcaacctttatcctttatcttttaactctactatcctttaactcttctgcttctttatcgcccgtgttgtaatacagtagtctgccctattctgtgtgggataccttccagagacccccagtgcatgcctgaaactgtgggtagtaccaaactctatgtgtatgttatttcctgtatgtatgtaactgtgataaagtttaatttatagattaggctcagtaagagattaacaataactaataagacagaatagtcacaacagtatactgtaataaaagttacaagaatgtggtctctgtcgctcaaaataacgtactttactcaccagtttcctgaccatggttgactatggggaactataatcctgtaacacaaaactgcagataaggtggggactatagtcaccaactcctattgatcctgcacagcagttttgcttgaattggtattctgtacatccttagtcttttcgttattggaatacttccttttttttttttttttttttgagacagagtctcgctcttccgcccaggccggagtgcagtggtgttatctgggttcactacaagctccgcctcctgggttcacaccattctgcctcagcctcccgagtagctgggactacaggtgcccgccaccacgcctggctaattttttgtatttttagtagaggtgacagggtttcaccgtgttagccaggatggtctcgatctcctgacctcgtgatccgcctgccttggcctcccaaaatgctgggattacaggcgtgagccactgcgcctgaccgttactggaatactttctgtacttgtaagtactagtttatattaatgtgtttacagaataaaatttagaaggcagagattctgtatttgtaatggtgacatttaggtggttaaagaggttgacatgaagagaaataacatgccattactcttatgagggagatacttagtatttttgggaaatgttgtgaatgtggccgggtgcggtggctcacgcctgtaatcccagcactttgggaggccgaggcgggcggatcacgaggtcaggagatggagaccatcctggctaacatggtgaaaccctgtctctactaaagatacaacaaaaattagccaggcgtggtggcgggtgcctgtagtcccagctattggggaggctgaggcaggagaatgacgtgaacctgggaggcggagcttgtagtgagcccagatggcgccactgcactccagcctgggtgacagagcaagactctgtctccaaaaaaaaaaaagaattcatccatatgcaattatttctttagcttcatactaatagttttactttttaaaggcatactaatgctgtgccttttaaacacatttggtgtcatcattaagttacaaagtattctaccccctatggcaatcacagtgtaacagtggatgaaattgttcattttgccaacctgatagattagactttagtaaattttgttttaaaaaatactaaaaaaatcatctgtttttcccaaactaattagagtgtacagttttaaaattgttttagaaacttattttagtagtgttcaaagtcgttagccagaaataggtctttggaacaagctctgcattttagggggaatttattgtgatagggaaatagaatgcgtaaaacattctttctccagatatattcttttttttttttgagatggagtcttgctcttgcccaggctggagtgcagtggcgtgatctcagcacactgcaacctctgcctcccgggttcaattgattcttctgcttcagcctcctgagtaactaggactacaggcgtgtgccaccatggctggctagtttttgtatttttagtagagataggatttcgttatgttggccaggctggtattgaattcctgaccttgtggtaacgccgaccttggcccagatatattcttaatacatttatcttactttactattacttcattattctattaatagaaagtattgctaacatactcttttaagataaaaatgatatgtaataattttgacttaaatatcttaattttcccttccaatttacgtttcaaaacaattgcttttagtacttttaaatatggcatcacttctgttgcctggctgttttattcttcagtattacaaattatgtcagtatatgtagaatacagtagttgcaaaatgttttatttaaatgagtcattttggttcactggatatacttctatgggtattattttttaaagttttaaaatatatttctagtataaataattacgtaaactgttcctgaaaatatgagacagaaaaaaagaagaaaaatcaccagtgcctaccctgtaaccaataattgcttttgtgaaagcactttaataaagtttcttagcttttgtttaaaaaaatttatgtataatttttcatactgcttttttacttttttatattactttttccatgatacaccgacaggttatattgtccaggcttcataattacatattttgaagggtacttagtattctacccagcaagtgtagtacagtttgcctaatagcattgattttgtcatttgacatttagtgttgttttttaatttatcacaattatagcgtaataaacaacttcattatagttctttccaccatatttaaggttgttttcttagattgcatatagagaggtagaattactgcgtcaaaaattcagttttagttcttgatacagtattgccaaaatgctttccagaaatgttatactggtttatattctcaatgtagtgtctgagaattccattttccttttactgtcattaggattagataatatgtaatttatatgaaagttagcaaatttaatagtttcttattttaatttgcagctggactttatatattcgtatttttttttgcaaactacttgttttgcttatatttctccggttttatttttttaaaacaaattctctgtataacaaaggtattaactatacttagtatttctttgagatttttttttctcccaagctctcatttactattctcagcacacttaggaatttacttttatgtgaataaaatctgttgaactttttattttttatttctttgtgttctaaatttagtaagttctctgtttttaaaaaccattcaattttcttgtctttttaaaatcttaattgatgtttaaaattctgttttaatctttgactattttgatagtatgatataaggcagcctttctcagttgggagagaattaagctccaataccctaaggcatctgttgtttactgtgaattaactttttttctgtgtgtctgggatggatggtactggatatgtaccatccttgggagaattgagaaagtagtgactcaaacgatttttcccctcttctatgattgaggtgaagaataccacttaaggaagactgttaaagctctaaatgtatctttttcaaatctgttagcaaattgttgtatcagtgctcactcctacatcatagaattgttgtgaggctttaatgacataatggacgtgaaatattttagcatggtgtttggcatgtggtaagcaaaataaaatgcgttagctgttactagtttttcttactacatttttctgattacatgtatttgagggtttttgttcctgagctagtactgatttaaccatatagacagcattgttgaaaccatatagacagctaatttggattagcattctaacctcctgacctctgttgctatccttgcttttattttacagatggtaacttttttttccgatatgtttattcttccagataaattttagaattattttgtcaagttctaaggagaatcccagtgggatcttaactggaattacattaagccaatctacatttagaaaaagtggttggttgtaatatttagtatcccatcatggaagatagtttttctacttattcacattttttctcccatattgttttatagagtttaatagtgcttcttgacatagagccaaattattactcctagttattttatatatttgtcactattataagtagcatcgtttaagtggtattggtgatattttgacgttctctagatttttaaaaaatacctactctttaagaataccaccttttctcttttcagtggtaatatttctgtttcatatttgtctgcttgatagaatttctgaaagaatgccaagtaactgatatgtagcattcttattttggtctttattggagatgtccttcatgtcttattttaagcataatgttgactgcttgtttatacttactttcaactctttagagaattattaaagtaatatatgctcattaaaaaaagagtgaaatataacaggaagggtcaatgtatttgtgatttttaagatttttaaaattaatacttcgttgaattttatcatttttattttgagataaaatttaatttgctatataatttgttaaagtaatatgttattctaatagatattctagcatcaaaacatctgtgggacaaattctactttttcagagttgataatccttttgatattttttctctagtgaatgggatgagttagggtcttagaattaaagcaacttggatttttatcattattactatttatttaatttttaatcttttttttttttgagatggttttttgctagtcacccaggctggagtgcagtggtgcagtctcggctcactgcaaccttggcttcctctgttgaagccatactcctgcctcagcctcccgagtagctgggattacaggcacctgccaccacacccggctaattttgtatttttagtagagatggggttttaccatgttggccaggctggtcttgaactcctgacctcaagtgatccgcttacctcagcttctcaaagtgctgggattacaggcgtgagccactgcacccagcctattaatatttttttattgccatttttagctgaatgaccttggccaaactgtctcttttgaatgtcagtgcttttgtgtgtagtttaatgacttttcatgtcccttgaattttagataaaattatctcaacctctcctctttcagctagcaccctttcaacctgtacaattccacagctagtggaaatccaaagtcttctgcaagattatgcagaaatcttactttctgatgatcatctctgcctttgaacctctacttccaccattgctgctgctttttctcatctctttgacccaggtaggaaattcagtccctttcttgattttcacatgtacaagcaaaaaccccatttttatggggaggattagagtttggtagtctttaccaagatttagagaaagcactaatacaaattaaactagggtagtaagcatcactattcttaaaatgtcttctagccactgcacttttggatgttttggccctagtcctgcttctctttccctaccttcttatcatcttgctattgtaccttcctgttaaaaccaaaattttcttcttgtttcttgcagagcagttctcccgtctttgactctttggcatacaactaatgcctgtgttttcagggtatcatcttcatcccaagtccattgtcagaacagagatactttctttcctgggagaagttctgggtctagctgtttatgacacttttcctactttattgttctaccctttggaactgtgttgaattaagtaagtaatcttcaagcatgcagactggtgctcacaaggtatattcaggggttttcctttccttctctgtcattccaactacctagctcattttaatcataatatgcctgtcacagctaaatcaatttgtctgtgatgtggttgacagtgcctcattttagttcataaaaatcagtgcttcaaagattgtattgctaaacttcatggaatgatttgaaaattgaatttgtttttatgtgttataaagctcagttcttaacttgtttcgcagagagttaattgttaaatccagtatggccacaggaggaggtccctttgaagatggcatgaatgatcaggatttaccaaactggagtaatgagaatgttgatgacaggctcaacaatatggtatgattccttactcttcatggtgtgttgttggctattaatgttaaaatgcagttttccccctgaccaaatttaactcactgatgctctttgtatacacttgctggccaagacattaagggaccctgggccgtttattatattaattgaagacacaaatcaaattgagtttttaagccccaaagcagatttactgttacataaagatgtaaaagtgttttttttatggaaaccatgtttaagacatgcagctgggttttaggaagggatttggagaaggaattgggaaattatcaagaattacgttttcaccaccctaactctgcttttgagtgcatctgcctaacacacctttctctttacagaccagttttctctcctctggtccatgtgatatactgtggctgtcccattgttctaaaccttttagttatgggtgcagttatgtactgactagttacctcttagttccaatttgaaattttgtagtatgattatcctaatttggattagatatgtgtttcttttttcagtcttctgtggcgagggtggggtgaggtgtaagtagtgtaacaggttggcaggaatattcactcatagattgggtggaaggacagttcataaagaagggggttttgttaaaataaggaaaatatcccaagtggtttactatactagtactaaaagaattttccagttggataaagtgggaatttacagacctttttgttaatgaattaggttatgtgagtttaactaagtaaataaaaatgttttctatttgaaactataagcactttttgtaattccatattagctgttaccatgtacatttttacctataaaaataatagctgtctttattgcttactaaatgctaggtactaattagttttaatcctattttgaaggtgacactattttagagattaggaaactgagactataggaagcaaaataaatagcctagggtcacacagtggagtgttttttcagaaaacagtaattaggtttagaacctaggttgatttgatttcagatctctttttgatacgtactgactttataggagatcggtaaaggtatctgtaatttatttcactatttataatagaaaatcacaatgtaaaaaaatcctcttggaaatattcagattgattttagggttggcatttgaggatttgtatttgttagtgatcttgataagaaaataatctcttttcagaaggatgggctataaaattaaggtagatgtaatgaggggaaaatgggttaatagaagtaaatatttgtctctaggagtataagtctgtcaaaaatgtcttgtcttttttaattttaaaactgaccaaaactttttaattataccaatctattttcctggtttgatacaggccatgttaatttttgcttttacttttttaaaggattggggtgcccaacagaagaaagcaaatagatcatcagaaaagaataagaaaaagtttggtgtagaaagtgataaaagagtaaccaatgatatttctccggagtcgtcaccaggagttggaaggcgaagaacaaagactccacatacgttcccacacagtagatacatgagtcagatgtctgtcccagagcaggcagaattagagaaactgaaacagcggataaacttcagtgatttagatcaggtttgtgaattatttttaaaaatgaagctattactgtgagaaatacttgaaatggattaaataatttgtcttaggaataaaaaattgagctgtttatgtaatttttaaaaaaagtttctgtgcctatggaaagaattttaatcactggggatggtcctgtcttctttagaaggaaatgaagtcccatttctaaacttgctaaagacatgcatttctggactttatactatgttatatgactaactcaagtgattttactatacaactaaattttgcattttggtaactgaataaaatggtattaagtaatggaaagttccagtttagtatatatatcattggctaagtgtgggatgtgctgggttacctcaagtttagaatgaaactattttctgtttataatcaccaaaataaagtttagatctaaaaacaagtagaaatgataataaattcttgagagatattttactcttagatctatatgtcatagagacacacacatttccaaaaatgtagaaaggtagattcaagtctgataatgatgttggtaatgatcatgtatcatttatttatatctatttatcaattattgaacacttaactgtatatcaggcactgagctgaatactttttcagacagttcttcatgtagacacaactttaattacattgattcattgggtccaaagcgtataaaaatactataagcaagtaataaaaagcaatatgagttaaagtgtgatccatggtcctaggacacgttgagcatccctaatacgaaaatccgaaatgctccaaaatccaaaactttttaagtgccaacatgagtggaaaatttaacacctgaccttgtgtgatggtctgcagtgaaaacgcgtcaaaactttgtttcgtgcacaaaattattaaaaatattgtataagattaccttcagattatgtgtataaggtgcacatgaaacataaatgaattttatgtttagactccggtctctttcctaagatatatctcatgtttatgcatatattccaaaatttgaaaaaaaatgaaactcctaacacttcttgtctgaaatattttggataaggggtactcaagctgtacttcatttagacttaccttgttcatattcgtcagttgaattgtctcagcaaagtgaagtctagaaaatgctaatcaaattttcatattgtagtgaaagactgttacagagccaaagctctttcaggtcttagtgcaaagctctttgtgtgcaccttctgaatcaatatctgatggcgaaactaagaacattggggttaaaacaaaattttgtcataaggttaatgtttgtgtgatttgatttctttttcatatatagagaagcattggaagtgattcccaaggtagagcaacagctgctaacaacaaacgtcagcttagtgaaaaccgaaagcccttcaactttttgcctatgcagattaatactaacaagagcaaagatgcatctacaaaccccccaaacagagaaacgattggatcagcacagtgtaaagagttgtttgcttctgctttaagtaatgacctcttgcaaaactgtcaggtgtctgaagaagatgggaggggagaacctgcaatggagagcagccaggtgataacgtttgtttcttttgctcattctttacacaaacctcaaaataccaacagtaaggtttagaaaattaggttacgcacacaggaattttagttgggtggaattaaagtgcttcactgacctcctttgttaatctgccagatttacttaaaatagagtaaatttctgtttatccaaaaatattttagaaatggcatattcaggttagttaaaggcttctgtttatttacaaaatagcatattgccagtttttagtaaagggggattggaaggaaagtgattaatagatttttgtaggaattttttaaaatggcaaatattcttttgaaaagttgtaaaactataatacatttaattaatttataaacattaggaaaatttatataaaaaattgtatgcagttgtagaagtaaaatttttcagatactgtagattaaaattttgaaatgtatttttgaattgacagtgattggagtttttagtattaccaattatgtcttgattaaaatctaagctggattcagattttttgcatgtgttaattcacacaataatccaagtgtctttggttatcttcgaaataaaaatttgtaaaactgttgctattgaactaattatccttagttttatatattgtgtactttcatgctttttttaaaaaaaatatttcccctgcagattgtaagcaggcttgttcaaattcgcgattatattactaaagctagttccatgcgggaagatcttgtagagaaaaatgagagatctgctaatgttgagcgccttactcatctaatagatcaccttaaagaacaagagaagtcatatatgaaatttcttaaaaaaatccttgtaagtattcgacttttaaaataacatattatttttgtagtatctcagtgtgtatttactgatgacattctgatgccaccccagaggagttaacatattttcaaaaaatcatgccatccattataacaatttattgcccattttaatagttgtatgatttataccgctaaaatatttcaggctagagaaaatgaggaggaggatgttcggactatagattcagctgtgggatctggttctgtagctgagagcacatcgctaaacatagatgtgcagtctgaggcttcagataccacggtaagcggctttttggtaattaaagtgctggaaatgaaggtttaaatttttctcccagttttcaagatgttatttttataggcgttccttaatgaaaagtgtattccagggaagaacccctcaaattgttaatgctgtatgtgttcttctgtatttaaacacggaagttaagttttatttattaacactaaaaatagttttaatggttaatttgaaaatgtaatttttgatcttcagtttatagaaacattgtttttgtagtttgttttgttaagcaaagcttcactaattttaagaagcatcgaggaagttaaaatggatggtggaattaagggcaataggcaacattagtgattacttagcatgtagtcttttggaaataaccaagttcatttgtcactgaggacacgttaaggatattagaatttttcattttttgggctctatcctagtactggagcaaaaccagatgactgaaaaatcgagagaaagactagtaaatgggacaggatagcatttacattgtgacttattcacaatgagaaaaatgctgtaattgctgacttggcaaaatggaatttgttgaagtactgtttttctgaagaatagtaatttacagaactttgaggaaagatttctaaaacttagtgtggttcaatgctagggtgtttttaggcattttaaacaggcgtgcctataaccatgcattattaagcttttaacacctattacaggctagtaaagcttttgttttgagaggataagcatatatctcttcgggttttgaggtgttcaaaatgccattcagcattaggaatttgaaggtttgtttcctattagtattgacctgcataattcttacctgcctcctttctcttcccggaccttcctaatttgaagaggtgatttggatttcttttctctacattattttcaacaggagatacttagagagcctgatccaaacagttgttgaagaatggattttactgtggggaaattctttttctatttacagtggtgcgaggcataatttcttccttaggttccagcagaaatggaagggttaggacgatgtgggtaaaggaattctgttggggaggagtgggaacttgtatagatttattgtaatttatataaagtattcattgtgatggcaatttctttcataatataaaatgacggtatgaaagttgactaataacatgtagcagagtaaatgttaaaaatgtgctttaacaactgtgtggtatggtaattccgcaggatgtggtacttgcttagttacagtaagcaacagtctagtctacagaaaacttaaaagactaaatatactgctgcttggagggggatgtggattgatttttgtttttttttttttttaaaaaaaaggtggactggtactttttaaattgttttacaaggctggcttatatgttaaacaggagtttgtgttaagaatttaatatgctacactatttaataaaggaggaggcatcttttattctgagaattcggccgtgcattgaggacaaactagggaattcagcttcacaagaacaggtttcagacattgacgttactacaagtccaaaagggaaaggtgacagacctcagaatgacagggaactgaggcctaataggaaatatagccaaaaacgtggatttccctcaaaggtatactttacaatattaacttgggaagtctctaaatgagcacttcttctgttcatatttcctcttctttatttgcttttctgttgttgctattactcttacatattaattgttaatatagttgtcatactgtaatttgctttagtaaaattctgtcccttactgttttttttctactttgttatatacctctccatggattatagcttacagctgtttttaatttatattaacaaaggttttgaaatgtaatttattcccttttttataaattgcgagtataatttataacacgttcttaaaccttgaccatcagtcagttgccctttgtttctgatatttgtgtttattaatttagatggggccaggcgtggtaattctagcactttggaagactgaggtgggcggatcacctgaggtcaggggtttgggaccatcctggccaacatggcgaaaccctgtctctactaaaaatacaaaaattagctgggcacggtggcgcacgcctgtaatcccagctactcaggaggctgaggcaggagaatcgcttcaacctaggaggtgtaggttgccgtgagccactgcactccagcatgggtgacagagtgagactgcgtctcaaaaaaaaaataatgaaataaaaataaataaatttagatggtagtttgtcagattttttggtttatatttttatttttggaaacccctttcatttgctttttttagaaaaattatccagttgacttggttgcctctttttttgctggttttttctgcagtgtttaattggttttttaattttccatgatttgcataatggcattccagatagagttaaagacaactatttgtagttccacataaaaagagtttgaataggccgggcacggtggctcacgcctgtaatcccagcactttgggaggccgaggcaggcggatcacgaggtcaggagatcgagaccagtctggccaacatagtgaaaccctgtctttactaaaaatacacgaaaaattagccaggtgtggtagtatgcacctgtaatctcagctactcaggaggctgaggcaggagaattgcttgaaccctggaggcggaggttgcagcgagccgagatcctgccactgtactccagcttgggtgacagaacgagactctgtctcaaaaaaaaaaaaaaaagagtttgaataaaaataccatttataaaagtgcatgtatctgttggcaggagcaaagtactattttagtaattgagtataggtaagactaatttcatatgttttattactggtttattacctaggactacactttcccattttgtggctattttatgggtttgttgtattttttttttttttttggtgtgtgtggctatttacaaatggtaaaacttcacctctagtattttggcagtttttttattttttctggttcctacaagaatttgagagcacagtttgaaattagttatgggaatcttattatatcaaatatcaagtaaaatgtgccccagttcaccagtagagtgaataaagtagctgattattttaaaaactagtggcattggagaagagcaaataaacatgaagcataataggtaaccattggaattttattctctttaatccttctgaatagtgacaagcgaaatttaagagttaacagttaatgcagtatctgccagttctttttttcttaaggcattacatataatttaaaaaccactttgctgtttttaggtttctttgaataatatccttataagtgattattattcttttttgaattctcttcttggcatttatttcattttgactttcttgattcttaaggctgtctcgttgttctgttagtattctatttgtaaaaacattttaatttcttcaggggaaaaaatcttaattctcaccacctgtgtttatttttttctctactctgcaggaactgtcattcttaccaccccacccctgtttcctccttagaatcttttcaaaatgtagtattctgttagaatagtggaaaacacagttgagggtcttacatgcgattcaaggttgaaagcaaccttgagacttaacgcatgatatgaaatgattgatattctagagctgcctaccaagggcacattccactttatgaaatattttaagacatgatgacatcttgtataagatgtcagaagaaggcaaaagaaagccttctacgagtagccatgcgttcattgttttcctatactcatggcccccaacttaatctcacctcttaaaatttataagctttctttgtaccttgtacctgtgttttgccattattttcatcattgctagttatttcgtgtgagattgccctgtcttttaaaccagctatggttcttcagacatgatgtcttatacttctgtatttagaacccagcacataatttggagcagatagtatgacgtaaagaagactagagcctaagaacctgatttcccttaactgtgacactggataagtcacaactttatcttctctaggcttatagttcctcaaccttcacatgaagaaattgaagtacataattatctgaagctgtcaaaatacattaggatccattaataattactaggagaacctcagttgagtagaggaaaggaagattgagggttctctgaaattggactactacatatttacaactcagggtttgatgcctaagttatttttttaatctgtaaactaaaaatatagttggtgaaagtgactttttcaaaaaaagtttaaagaaaaatatgtgtttgaagaattaatatacacctagcatcctttttggatttctattccaggtgccatcttcctggtatgttattactcctacctagatatttttattttctcccttctgtatatttcatcataggctgtactcccatcttttggctcagtttttttgagcatcagtctgaaatgttgtttatatgaatgtgaaagttattaagtagtaatatttcactaattttgaaaattgagaattcatttttagattagtgagaaatctgaagataattgtgtttaatagcttagaattctttatgattaggttatcacagttttgtgactaataaggattaaagaactttttagaaagtacgcttttttctcatttgcatatttttttctcctaattataatttatgctttgctagaggagtatttgatcaacctagagagattttgttttaccccttccattgatatctgtacctatttgatttggttttacattttaccgttgactttgatgaaatcattataaaattatttttgctgcattctgagagggctagctattgataattatccctacccttcaaagttgtttttttcctaatgatgtaaactgtctggaaataagccagactaggatgaatttccacggaaatggatgtaaatatttacaaggtaactccccttatataggataggagagaactgagtaaacagtacttaatttgttaaaagtttcagtttattagaggttcaagacaacagaaaaacctctaataaatattggcttaccaagatccaggtaggctatttgtttcccatgctcatgaagtctagagatagtctaggatagagaggcactgactaggcacctctgatgtttacatgaaataatctaattatagccaacttcctatttgatcataactttcttgaatatttaactctttgccatgtacttatttgtttacttattaattttatggatttccaagtcacagtgtaaaatattaccacagttactcatgctcattcacaatactgatgagttctacttggggaggtaaagaaatttttatatagtattgtaaaggatgtcacccagaagggagtttctcttgagcccatctgcatgctccataatttctctgggaatcaaatgtacatagcaagtgtagatcagtgcatttttactttcaaaagaaatctttgaacttctttgctctctttagtcatttatttgaaatttacataacccgacaaaaatttgttagcagtacaaatttaaaattgactaagtgaaacaaaagtgaaatattttatgtaaatattaggtaaaatcgttcaacttttaaaataaaagactttttaaaaggtaaatcggtgatgaaaaatacaattacggtatacgtttcgatgtataatttagcttgtaatatattgtttccaggttgtatttaaatttgtctctgctttgcttttccattttcttgttggattacattttgaatagttttaagattaacacttaaaatttcatcattttttgtaagtgccacttatttaatccatccctctacttttagactagatgataacctcctagcattttcggggaatttggaagtagttacttccattttatgtcatcagactcagatgaatgagcataatttaagaggaaaataatgatgcctttgatgacgaatataaaattcgttattttcttagatgtctgataatatgatgtgattaaatgaaaatctttttacataagattatcaaataaaaaatgtatttttaaaatttcagtcctttgttagaaatagtaggtgtgcctactttctaggttttgttgttgtttttaaatattacttctagtcttttttttttccttttttcttttttctttgagacggggtctcgctctgtcacccaggctggagtgcaatggtgcagtctcagctcactgcaatctctacctcctgagttcaagcgattctcttgcctcagcctcctgagtagctgggataacaggcgcacaccgccacacccggctaatttttgtatttttagtagagatggggtttcatatgttggtcaggctggtctcaaactcctgaccttgtgatctgcccacctcggcctcccgaagtgctaggattacaagactttcaggtcattaacccagtataatgtgctccttttctgtaggggcctagattcttcagtgtgtgtgtgtgtgtgtgtgtgtgtgtgtgtgtgtgtgtccatgtgtccgtgtccctcttggccttttatgttttgtatatctttttcttttccttttgttcattcctcttcctgctgagccattgattatgtagctttttactgtgaaattacctcttaagtggcaggctatatatatatctctgtgtcatcattctgttcttactcttttttcttgatgtctactaaaactatatttagggttgtatatttaataatttgttatcaatgtgtatactttgccattgataattgaaaccgcaacatggattttaatagtcagatacaagtattgttggtcttattttccaggccagagatcctcagcaggagcctatggaagagatagaaaatttgaagaaacaacatgatttattaaaaagaatgttacaacagcaggagcaactaagagctctacagggacggcaggctgcacttctagctctgcaacataaagcagagcaagctattgcagtgatggatgattctggtatgtcacagtctgagaatattctttttgtaaggaagactcatacataattgtattgcagggtggatgctgattattacataatcagatcttgattgttgtctagtttagaaaccttcatatgaggcttatactttcctgtgcttttctctggttatgcagaaaaggttgcagggacaactggccatcatactataccatgcagatagccagatctctctccttttcatcagagagtacccttaagaggtaaaagagacaggctgtagttctgtttttgtacctcagactgataaggctcatgatgcgtttatttcctttttttctattttattcagctaggattgtcattctttgcttgcctcccaagaaagggttaaaaccttaagtgaggcagtgagtaaatttataaagtgtctttaaccttcaaggttagtagtagctagtagctgttattttaattaggtatccttttgtatatgctagctccttggaactatatttatagtgtatacattcttcgtaagactcagaaattttcttcctcctttcctcatagccatgtgtgaattagatgaaagttgtgttgaatttcttagtattgagtctaattttgtacgtttatcatcaccttcaaacttattttagtttctcgttaaattgcaaaaaaagatgattagttattaaaagtcaacaaaactaagttatgttttctaatagtctatcccccactgtctgcttttagtaataatttctcttctttgagcgctttgtttttgcgagtgagttaggttctcactgaggctaccctgttgtgaatcagtttattctgctgtccaaacctagcccactggctcacctgtctaatccctgttatacctaatttaagtttgcattttcacaaggaacgttatgactttcaaataacctctttttttttttttttttttttttttttggagacagagttttgctctgttgcccaggctggagtgcaatggcatgttctcggctcactgcaacctctgcctcccaggttcaagtgattctcctgcctcagcctcctgagtagctgggattacaggtgcgcaccaccatgcctggctaatttttgtatttttagtagagtcggggtttcaccatattggtcaggctggtcttgaactcctgaccttgtgatctgcccgccttggcctcccaaagtgctgggattacaggcgtcagccaccgtgcctggtcaataacttactcttttgtagtaatgatatagctgtatagagtactgtatacagtaataattacaaagatttttgtccccatttctccattgtaaaatttaaagtaccattagcttttatatttaggaaacagataatttaggaaaagataattaaaatgctttaacataatgactagtactagtttggttaatgactaaccttttaaatatttttcgagtttggaatatcagatttaaaagctttcctttggtagttaatattaatctctaaacttgcataatctcctttgatcatcagagatttctaggttagtcagagctttaattcttatttctgttttatagagaaggaactctacagagtttgtggcttgcctagatttatatagaattttagcagaattacatttcttgaattgtaggtcaggggtcttgtttctttttctgaatatgaacttttgaaagtaagcagataatttctttttaaaaaatactattatgagtcagagaataggagtataatgcacatgagtttgaacttcatactatttcaaaaagaattttagcttagtaattttaaaacaaatttagtcttgtatttatgagattttgcaggggcatgctaatgaaaagccatggaaagctacaattacagtatttaatctagtatatgagacattatcttgggataattatgttacctcaaagagtgtccctttcaccatttaactaacaagttacatataattactgtaatttctttcttctcagcatagagttttgactagacatataggattctatatagccttgaaattctcagttctcagtggaaaaaaggtagtgttttcctttaaaacagaagcaatttataactaattgtcttttttctttatcttttttttttttttgagacaggatcttgctctgtcacccaggctggaatacagtgggcgtgatcttggctcactgcagcctctgcctcgcaggttcaagtgattctctcaccccagcctcctgaatagctaggaatacaggcgtgctgtaccacgccgggctaatttttgtagttttgtagagatggggtctcactgtggtgcccaggctggtcttgaactcctgcgctcaagtgatctgcccaccttggccttccaaagtgttggaattacaggtgtgagacactgtacctggccaccaatgtctgttttagagttggagagttagaagtcaggttaaggatggagttatttgttagtagaacagtgactatcatgaaaattgttgtcacaaaactgctttatgaatatgggggcattttttttaaattaagaagataaaaaccacagtcttttagtatgacttgtatcacaaacagccacttcaataaattatccattttactgcaggggtcagcaaactatggtcagctgagtttggctcattgcctgaaataaagttttagggaacacagccatgcccttttgtttacattgtctgtggttgcttttaccttgtaaaagcagagttgggtggtcgagacaaaaactgtatttcccacaaagtttaacatatttactatttcaacctttaagcaaagtttgccagcccctctaccggagaattgattctattcaagaacatggagattgaaacctgtcagaatcagctgtgcttttttacactatcactttccctttcactcctcactgatcttagacctgctccactgagtcactactattaattggaatgtaatagtaaccctccttgtatgttgggacaggaaaagatgaaccactttaccagagttttgtgagcatccctttatttttaagttaggtggtaacttctaataaaatgattgttggcagatagatcggattgttaactagtttcaagttacgtatgtgagctttttaaattctttttttaaatttatttttagcttctcagagattaaaaaaggtgtttgattatttacattaatcagtagttactaatttctttccagttgttgcagaaactgcaggtagcttatctggcgtcagtatcacatctgaactaaatgaagaattgaatgacttaattcagcgttttcataatcagcttcgtgattctcaggtaacctagatgttttagtatagttgagtttaaaaaatcacattaattagaacagtgattcagaaacttcagtgagcatacatatcacctggcatgattgttgagcagtgtaggtttctgattggtggggtcccccccaccttcaaaattacgattcatggatttggggtgggcttctccacgtctcagtccaatgctggtggcctggggactatactttaagaatcactaaattagaggagagtttactttgaaggaagtgattaatgaagtttttctttgtatgctactggatgacgtattcttttttcctctaaaagacttaatggtcacaacgattaagactttgctttaaatctgtgtccttcgactagatacatgggattctatacagccttggaattctcatttgaaggaatattttactaacaattttaagaaagttcttaatttgagagttagcaagtgttataatttgatgcactttgtaagtgatataaatgcagattttcaatatgggggccttgggtaagaaaggatgaattaatgcctctccattggaagtgagtatgattgaagatgcagtgtctcttgtcttcttgctgaccaagtgaaaatgagagaatatggcccaaccactttggagagttatatagcagtacctagtaaatttcttctggtagacctggggcctactttagagaaactctcacatgttcagaaggaggtagatggaagaatattcatggcaactctgtgttaatagcaaataaccagaaacagcccaaatgtccatcaacagaaatgggctaatgaattcttacatagagtgaaattctttatagcagttacagtaaataagccattgctaatgaatacaaaattcaagtttaagaaggatcccacttaccttattttaaaaaaagtctacatttttaatgtatgtatacataggcattagaaaataaaaacatgtagagaatggtagatgcctgattccaggttggggttacctttggagtgggtaatgacattggaaagggtacaaacagagctttagttaaatctgtaatgttatatttttcttaaaataattgatgcaaatatgggaaaatcttaaaatttgactaagcataatgggagatattcattatatgatttcctaagccctagtggattcttgcaaagtttcataattaaaaaaaatttaaaaaaaggccaggtgcggtggcttatgcctgtaatcccagcactttgggaggccgaggcgggtggatcacttgaggtcaggtgtttgagaccagcctggccaacatggtgaaaccctgtctcaactaaaaatgcaaaaatgagccaggtgtggaggcatgcacctgtaatctcagctgcttgagaggctgaggcaggagaatcgcttgaacccaggaggcggaggtttcagtgagttgagatcacgccactgcactctagcctgggccacagagtgagactttgtctcaaaaataaataaataaataaataaataaataaaaaataaaggaacatgagagagaagtggtgggaaaaattgataggttaagaagttaaagtttacagtggtagttctagaaagaaggcaagagagagaatgagatttttgaaggtttattttatgtaacgtggcattgttattacttttgattcaattactgatgtctagtgaatccaagacctctgtgtggtcatgtgtctctaaaactatgtagagtcagctctcagtatctgtgggttccacatccatggattcaaccaaccatggatcaggaatattttggggggagaaataacacaacaatttttaaaatgcaaatttaaaaatataacagctatttacatagtgtttatattgtattaggtattataagtagtctagagctgatctgaagtatataggaggatgtgtgtagattatgtgcagatactacaccattttatataagggatttgggtatctgttgtttttggtgtccccaggggtccttgaaccaatccctcatggatactgagggatgacttcatatgttaatagtggcatatcaggaaaccgtatttaatttgggaatagtaagggtatatacttacctaccagcacagcctagcaaatatttctttctctttataaagaatatttatgcatttaaaaaatgagaatgcatttaattgcgttagtcttaattcttcttttttgttgtttttttttaataagcctccagctgttccagacaatagaagacaggcagaaagtctttcattaactagggaggtttcccagagcaggaaaccatcagcttcagaacgtttacctgatgagaaagtcgaactttttagcaaaatgagagtgctacaggaaaagaaacaaaaaatggacaaattgcttggagaacttcatacacttcgagatcagcatcttaacaattcatcatgtgagtaaatctggttcagcagtattgggtataagacacacaagtatatatactgtcacataataaatttagtatttggtgaatgaacacatagctcctcaaaaatatttgtagggacttaagacttgcatatgaaaagtttctaagttgcaagccaatatatatgaaagccaaataggtgataaatcagttttataattcagaaaagggaaagaataaagttggaccttgaaaaattagtaggattttaataagggaaaggtagaagagaaggcaactgtttgatacgtggacatattaatactttgtttcttaacattcaaaattttcccttaaagaaaagttaatccagttagtactttgatttaaaaacccaaaactgtgaaacatagtgtgtattaaaaaaaacaaaaaacaaaactatgaaaaacttttatatatggtttagtctagagagcccagaacttccaactgctggatttatattcatttttaaaaaatatataaataatcatctcaagcaggtataactgcgggagttatcttttttgctccacacgtgtttaaccttctttgtctaaatcagatctagtcttcagttcctatcctaataccttttcaaacatggcccctgtctcatatccaaatagtaatagaggctcaagcattagaaattgaagtcagtagggacaacttccaactagtctttaaacattctagctgctgtctaattaaagaaaagatgagggatttaaaaataacaaaaccattgtctctggagcctctggtccttattctccacctatctccttttccttttccacccacaaaagaaccttaatattcctgtcctaaaacatactcctttcttttctctgacttctgctagtctctttctcctctagagtataatcccagtttttatcctttacaaacacatgaatacaactaagatgtgtggctgggtgtggtggctcacgcctgtaatcccagcaccttgggaggctgaggcgggtggatcacctgaggtcgggagttcgagaccagcctgaccaacatggagaaaccccgtctctactaaaagtacaaaagtagccaggtgtggtggtacatgcctgtaatctcagctactccggaggctgaggtaggagaatcgcttgaatctgggaggcggaggttgtggtgagccaagatcgtgccattgcactccagcctgggcaacaaaagtgaaactccatctcaaaaaaaaaaaaaaagaaaagaaaaaaacaacttaacatgtgaaagttgcgcttaagtccttgtcgtcagttttgtatgcataaagtagcactccgtatactgatgactcttaaagcctatttttttcctcactgggaagcagtgtgagagcagcagcaaaaggtagactcgtcaaggaatagaatgaggagactgctggaaaccacctacaggaattgtggtactaaagtgagcaacaaataatgatggttcctttgagaaagatactggtaaatgacagcacctttgaaatggtaggaggtagagaagtgcaaagattcttaatctttaattcctcttgaaagcatgatttatatttgatagtaacagaagttaaatagaaagtaattaaatttagttcaaggaccatagaggattagccattatctaaatagcaggtttttattgctgtttaatatttcatggtttgaggtaccacagtcacttttaacacttttctttctctcctggagcaagaaaagttccttcttggtgtccagatgtgacatccccctgatctgtgggtatgaaaaactgatgaagacctaatcagctacagctaccctgtaaagattacagattgagtactgcacatgattcatagtggccctgtttaacttaacctagaaccaagtttatcaagttagttaccaagtttactcgttagttaaaactaactagagtacttctctagttagttttccaaggtagaatatcattattcttgtcaatttccatcttttttctttcctttctgttttaacccagtggttatattgtaaaggtgatagaacctgtggaagaaagaggtaaacaagtctttgtacattttgatgtgtttaattgtggagtaagttaataaacaattttctgaaatttaaatctgcagaaattaagttgttaatttttactttttagttttcaatatccaagccaactgtatgtgtttgtttatggtaactggtgattaaaaaaaattttttgttgttgtgccttcttcagcctctccacaaaggagtgtcgatcagagaagtacttcagctccctctgcttctgtaggcttggcaccggttgtcaatggagaatccaatagcctcacatcatctgttccttatcctactgcttctctagtatctcagaatgagagtgaaaacgaaggccacctcaatccatctgaaaaactccagtaaaacatttataatcattgtttacatgaagttaaataatagggataaattctgtttttttttttatgttgaaaattctgcaaaacgagatttatttaatattgttgtaaacattcttaagggataggtagaagaggcgtgtgtgtgttgtgtgggcataatttgagttgtctaagagatgtgatgtaacatagtttctgtgaactgatgttactttcttgtttttcaaataaaggatcaaaaataagattacagttaaaatatttctatattcagatggtttagagaccaggctgtagaatcagacagccctgaaattgtatcacacaaggctgtgttaccctgtacaaataacttagccttactaagcctgtatttcctcatctgcaaaatagggatgataatatacctgttgataaatatgttttcattaaaaaacgttggcgcagttcctggcacttacagtaagaactcagctaacttaatttttatttttggtaaacgtagtatgtagtgtatagatctcatatgtgcagacaaatcaagaaccttccatacatgctcagtaatgtctgtatacctgattttcctgagaggtagtatttagtagtacttcacacttttgatacttgagaaactagaaatctttttgacatcaggttttctgctattaacatttacacctgcttaaaatgaacaattaaattgaaattggttttcttacacttttgtccctaaaacagcataagaaaataatgtgagattttgagtaagctgtacttggcattaacctcattattttacagtcataccccctggagagttcactaggtggatattccattaggtctaaattttgtttctgttagctgctatgatatgaaaataatgtctgtattattttgctaaaatgggtgtaaatcgtatacataaattttttgtttatcaggaagttaaatgaagttcgaaagagattgaatgagctaagagaattagttcattattatgaacaaacgtcagacatgatgacagatgctgtgaatgaaaacaggaaagatgaagaaactgaagagtcagaatatgattctgagcatgaaaattccgagcctgttactaacattcggtaagaacttttctggggatgtttttccagcatattcattctgtcttgatacttataatgtgggaacaaaaatacttcgttgtagtatttactatttgccttttatttaagctttctactattttggtcagtgtaatcatctctgccctgtgaagaaagatgaatagggaagtatggagtacaatagttcagtaaatttgccctttgttagactgaattcgagtaaatcatgagatgtatctaacttagcattttgctgtctttttctttttaggcgtaattttcattttttcagatgtttttctacttaaatagcacatatgcagaagttaatgaaaagcaggagtcgattattcaatttgaatttaaatggaatagccaacaatgtgcttggtttggtgttattttattagcagttctaaacttggatttctttctctctttttttgtgccttaaatgacttcaggctgttttctttcttctagaaatccacaagtagcttccacttggaatgaagtaaatagtcatagtaatgcacagtgtgtttctaataatagagatgggcgaacagttaattctaattgtgaaattaacaacagatctgctgccaacataagggctctaaacatgcctccttctttaggtatgactgactgtatttacatataattttgctgtgttattcttacaaagtgggttttcgttcatgtgtgctctttcctttaaaagttactggttttaattatacatgttttcagcagattgtcgatataatagagaaggggaacaggagattcatgttgcacaaggtgaagatgatgaggaggaggaggaagaagcagaagaggagggagtcagtggagcttcattatctagtcacaggagcagtctggttgatgagcatccagaagatgctgaatttgaacagaagatcaaccgacttatggctgcaaaacagaaacttagacagttacaagatcttgttgctatggtacaggtaaatattgcttggtcttttaaaaacctatttgtcaaatagtacagtcttaagtaaaatttgtgtatgataattactttggtttaattatactaatacacatttatgtatcatatgtgaggtttaaatttttagcactttacatgctgtatgtcagaggtcagcaacctttttaaattaagagtgagttggttagatagttgcggctttgtggcgatatagtatctgtcacaatttcacaatgcaaaagcagccatacataatacataaatgagaatgattatttgccaatatagctttattttattataaacaatatagctgtttttatttacaaaaacagaagaggttttgttgtttttgttgttttgctgacaactctggccttatattatgtacaacttgcagcatctcaatgaggtagacattaaataggttaaagagatcttaattgccgaagtttatatgactgtccaatccagaattcagacttcctgataccagagcctgcgatcttaacctactgtatataaaagaaaaaccatatgttatcttattcagtaaggttaaagttagaactattaatcataaattttaaaaagcagtttatacatattttgtattatagttacacaattaactataatgtacaattgtatatttatacaaatgtaaaaatatacaattatagttacataactattaacacaaaatatgcctacacttataattgtataaatatgtaattaactataattgtattaccgtgtaactattaacacatttataaaggtgttgtgtatatatatataaaaatcatataaaatggtttttgtgagtgaaaaacctcaagttttattaacagtttcttttgaaatgctatgtactttgaattactcaagtaaaaggtgagcgtgctctctcggttcaaaaaaagtacgtatttgtatttatttattttttggggacaaggtcttgctctgtcacccaggttggagtgcagtggcatgattttggctcactgcaagctccatctcccgggttcaagcgattcttctgcctcagcctcccgagtagctggaattacagatgtgtaccaccacacctggctaatgtttgtatttttagtacagatggggtttcaccatattggccaggctggtcttgaactcctggcctcaggcagttcacccaccttggcttcccaaagtgctcagattgcaggcacaaaaagtacatattactaataaactctgtctttacctccattaataatcctattcttcttcactgaagttgctaggccttttctctgcagttaggtacatcactatgcacctatttttaaaaaaatacatgacgttttgtggtatgtttctttgtttttacaaactgtatatataatacactaagtattattttatagctttccttttttccccactccacattgtctcagagaactttcatgtcagtatagttctatataattataagtaattaagaaacacaaatatgataattataaaatataaataatactgcatatatatatatacacacagtacatagttatttgtagctgcagtacagttttcagtatatcgatggactttagttaatgtataatagcatccagttactatatacttgttttcaatctttcgctatttagaaacaatgcaccaaagaatatacttgcacaagcttttgtgcatttgtgttttttaagaaggatttggagaagtggaactactatgtcagttggtgtacattttaaaggacacaacttaattggtctctagagagcaattttctatatgtatttccgtatgtatttatatttctatatgtatagaatttttgatatgtattcatatttttctatatgtattttttatattttaagcagtggtatgtgagagttcgtttctccacacccttgattgtgttttattttattgatataccgtagcttgtttaaccattactggaattggccttttccaaatttcccaattataagaagagttattgaggtgagataaacatgtatgcaaatacaaacgtgtgtaaacaaatatatattgaacacgtgtacacatgtatacaaacgtgctttctttactgctttaatctttttatgtaaattttacagactagtggtatttactaaggtatgaattggataatgtcttgaggtatcaagattgttttaatgtaatgatgctctttcaggatgatgatgcagctcaaggagttatctctgccagtgcatcaaatttggatgatttctacccagcagaagaagacaccaagcaaaattcaaataacactagaggaaatgccaataaaacacagaaagatactggagtaaatgaaaaggcaaggtatgttaagcttttggccttcatttaatataataaaaatttagtgcctgttttggagaaggtgctcagctaggtactgtgttatgttgtgcctaatgcttcatcacattttattggagtccataaatataatgtcaatttaattgtagagagaaattttatgaggctaaactacagcagcaacagagagagctaaaacaattgcaggaagaaagaaagaaactgattgacattcaggagaaaattcaagcattgcaaacggcatgccctgacttacaggtaattatgaaatttatttctaattgtctgaaaaaagatgtttaaaaccttaggtcaactgaaagtactcttttttgtttttgtttttctttttttttgaggcagagtctcactctgttgcccaggctgaagtgcagtggcgtgatcttggctcactgcaagctctgcctcttaggttcacgccattcttctgcctcagcctcctgagtagctgggacttcaggcacccgccaccatgcctggctaattttttgtatttttggtagagacagggtttcacagtgttagccaggatggtttcgatctcctgacctcgtgattcgcccgtctcagcctcccaaagtgctgggattacaggcgcgagaaactactcttttttttctagtattaaggtgacagaattatatctagtaattttgtgattaatgaagtggatgaactaatgaagagttggggttatacgtttacagtgtaaaagacagcacataggaattgactcattattttcattcttactgggctggctggccatagattcagaacatgtgtactcataactgtttattatgttaaaatattctgatttgacttttgcagttatggaccagcatttccatcttttactggcctgaaataatataataaaatctttaagccaccataagatatctaaggaaaataactgtatgtggtttaaagagtaagttgtatatacttttgcttattaactaggatcttatacatgggtcttgagattgaacagaaaataagatatctttggtgatatcaaataatcagttaataatatgggaaggggataataattccttctgatattttcccagagtttattggctagcttttttttttttttttttttttttgagacggagtctcgctctgtggcccaggtgggagtgcagtggtgcaatctcggctcactgcaagctccacctcctgggttcacgccattctcctgcctcagcctcccgagtagctgggactacaggtgcccgccaccacgcccggctaatttttttgtatttttagtagagacggggtttcaccgtgttagccaagatggtctcagtctcctgccgtcgtgatccgcccgcctcggcctcctgaagtgttgggattacaggcgtgagccaccgctcccggcctattggctagctttatcttcagttaggttgtgttttcaaagaaaggaaaacagggcaactgtgttcattttctaaacccttgcctttcctactgtatctaatcctttttctctccttatctccaatctaaataatgtctagagaaatatgttgcaaaggtgggttaagtatacaaaattttccattatgttttatccctgttgtttctgttgtttctgagggcttgtgtttgttaacctcagcttgtgttttcatctttgttttcttatttcatgttatcttcggatgatgatggaagtcagggtctgatagcagattaaatatggcactagagccttagtgccatatttaaagtaactgcttttatgaaattaatataattgctttaattcctcataacgttttttgtgaattcctttttagctgtcagctgctagtgtgggtaactgtcccaccaaaaaatatatgccagctgttacttcaaccccaactgttaatcaacacgagaccagtacaagcaaatctgtttttgagcctgaagattcttcaatagtagataatgaggtattgtaaattgtactctcttgttcctgagttagtcttttgttttcctttttttttcttcaataaggcacatctcaagaaaggaaactgaatatccttgaaacatgtttgtaaatagtagtctgctttgtgccttttttagtagacacaaaaatgtaatagattataataatataagaaagataaaacattttaatttttaaactttaattgaaaagttttaaataattttttctaaaaagtaattatcttttaaaaatatccatgttctttgttagtaaatatttggcagaaatatataggggggtagttgcagcaaatagtaatcatttcagttagaaagacctatcctttgacattttatttatatgtggtttgtagaaaatataatttttcctaaataatttctgaagtatatttgagttctacttgtttctattaataggccatgtgcggtgactcacacctataatcccagcactttgggaggctgaggtgggcagatcatgaggtcaggtattcaagaccagcctggtcaacgtggtgaaaccctatctctactaaaaaatacaaaaaaaattagctaggtgtagtggtgggcgcctgtaatcccagctactcaggaggctgaggcaggataatcacttgaacctgggaggcagaggttgcagtgagccgagatcacaccactgcactccagcccagatgacagagtgagactctgtctcaaaaaaaaaaaaaaattggctgatttttttgtaatcataactatattattattttaaccttcatggacatgttagtgtgaaaaggagagaatgagaatagaaacctttgttgatactgacaatactagtagtcttttactcttttaggctacagcaaatccaaatatttatttaactctggtttcttaaaaaaaatagttgtggtcagaaatgagaagacatgaaatgttgagggaggagctgcgacagagaagaaagcagcttgaagctctgatggctgaacatcagaggaggcaaggtctagctgaaactgcatctccagtggctgtgtcattgagaagtgatggatctgagaacctatgtactcctcagcaaagtagaacagaaaagtaagagagctgcataaatcacttttctaaaaatgtcacctgccgaagattgacctgtaggctaggcagccacatttctcctctacatcacagcacaaatctgctatttcagtgaggctactgtttaactaccacctttgtgacccagtttaattgaatccagccactttctgttctgacttctcgtagcatcagctttctcttttgtcttaaattactatggcacttgatcaaatggtgatacagattttcttatgtgtataagccttattagttaagtttataaaaagaaaatgcttgatattttgtagtgcttttctgtcaggccagaaataggcccttttttgcttaaattgagtatctgctgtttgtaaggttcttaaggatcttaaaacattttattataatcatttagtttttaggatttcagtttaaaatgtccatatttagaatatttctaaaagagttggtcatctataagatcagtgaattatttagctatatagtagtaaccatatcaaaaattttgaaatatagatttgtttatgaccttcccttttgatatcctcagatggcatttctggaatttctggagttttgcaccaagccctactctcttctcagatgaacttctattcttggggtcccaatatgcattttactgatcagactatatctacaatattttattctgttctgggtactacacgtctgttcttctacagagttcttcagatagttttgatgagcatctggtttcagaatcattggtctggatttttgctgtccagtatggcagccactagatataggtggttatttaaatttcaatcaaatgaaattaaaaatttattttctcagtcatattagctgcattttaagtgctcagtagccatgtgtacctagtgtctactgtattggatagcacagatacagatgattgccgtaattatagaaagttctgctgaactgcactgatcttgaaaactccctcaagcaaatgttaagggtagtttagctttgggaagtagtcccaggggatatgatgattatttaaatgtatttgaagaattgttttgaggaaggcaaactaaacatattctgtatataacagcaatagggagagtgccacccgtagcatagttattgtgattaaatgaaattttatatacagacatgtatatgtatgtttgaaacaatgtctggcacatagtaggtggcagagtatttaacttatctccagaatgacatctgttttatgtctcttaatcactagaacgatggcaacttggggagggtctacccagtgtgcactagatgaagaaggagatgaagacggttacctttctgaaggaattgttcggacagatgaagaggaggaagaagagcaagatgccagttccaatgataacttttctgtgtgtccttctaacagtgtgaatcataactcctacaatggaaaggaaactaaaaataggttagtttcagtattttaattttgtgcttaatttaagaggctcaggtctttttgactgacagcaagcacttctgcagttctccaagccaactgaatgtcctacaactcaattcaatttttacactaactactcagagttagtgcagacccctcaagttaaggggctcagttcagtaagactgccctcacctcagacttcaatttcaactgcttggtccccacgttacccacacttctgtgcaacatggctagaaatttgggagttcttacaatccccttcaggtttatttgctagaacaactcacgaaatacaggaaaagacttacttacgtttcctcatttcttataaaggattctgaactgccaaatggaagaggtgtgttaggacagtgtgtgggttggggaggtgtgcagagcttccatggtttcctctgtgtgtcccaccctccccagcactttgatgtgttcagtgacccagaagctgcctgaattctgtttacggttttttaggagatttcattgcttaagcgcaattgataaaattgttgactgttggtgattgttctcattagcaaaaattcacatctggttgaaaggggcttgttacggataacaaaagacattatcacttgggagattccaagggttttaggagctctgtgctaggaaccaggcacaaagaacagatagatattttattataccacaagaatgttgttccagtagatccaggtaaactggatcagtcttcactcctgctgttgagaattaagcaaaaataacaaattgtagatagtgaaaagagtctgccaacaaagatgttattacattgttactaataattataactgaaaatttcttcatgaataacagatggtgaagtagatacagtagctccacttgatgaaatactatgtggttgaacttaaagcgtgaagaatggaaaactacttgtgacataataaatatttttattttgcagaatacttaattatatggacactgctgtgtaaaaacatacatgaaaaagactggagactaatgaaaactaataattgtacaaagctaaagatctggacttctcccccctctatattttttaatactttgtatgttcttttaatttaaaacagaatattggcccataggcctgagtatcagagtttattgctgtattttaaaaaccaaattattatgtatgatgacttaatgctttcaatcttgtgttaggtggaagaacaattgccctttttcggcagatgaaaattatcgtcctttagccaagacaaggcaacagaatatcagcatgcaacggcaagaaaaccttcgttgggtgtcagagctctcttacgtagaagagaaagaacaatggcaagaacaaatcaatcagctaaagaaacagcttgattttagtgtcagtatttgtcagactttgatgcaagaccagcaggtaaaatttgctatgaaagtatatttttcgtctatttttataacttctgaagcaatacaaatttttctcaagtcatcagtaactattaacaaacattttctttcaatagactctatcttgtctgctacaaactcttctcacgggtccttacagtgttatgcccagcaatgttgcatctcctcaagtacacttcataatgcaccagttgaaccagtgctatactcagctaacatggcaacagaataatgttcagaggtaatctgtttcttagaagtattgagactgtataagagctaacattgagcagaggttttacagttagcttctgggagaaaagagcaagaccaaattgcatatttggacattctctttcccttgagaattttataagtggtgatttacctaatgtttccttttaataccatggatttctgtttttataaatttatgttattgaattttacttatattttggcagattttatggtgtgtaaattgtaccacagtgaagctataaacaaacaaaaaagtgattttcttacagttttaccgactgtcggacagaagtactaagttcatttcttgttccagagggaaagttattgaattaagccttatagagcaagcacgtatttgttacagtatcagagcagtttgtctgcatgcttttgaatcatttttttacatgtattcttcctgaatgtactttatatatatggcaatataactgattcttagattactgacttaaatctttgtaggttgaaacaaatgctaaatgaacttatgcgccagcaaaatcagcatccagaaaaacctggaggcaaggaaagaggcagtagtgcatcgcaccctccttctcccagtttattttgtcctttcagctttccaacacagcctgtaaatctcttcaatatacctggatttactaacttttcatcatttgcaccaggtaggtgacttaacctaaagagaaaataaataaaagcaaagtgtttggaacaacgtaatttgtctattgcctagatgttttaacattttcttttggagtggggtaggaaatgtttgcaaagaaagttacaaactcttttttttttttttctttttgaggcggagttttactcttcttgtccaggctggaatgcagtgacatgatcttggctcacggcagcctccacctcccaggttcaagggattctcctgcctcagcttcctaagtagctgggattacaggcatgtgccaccgtgcccagctaattttgtatttttagtagagatggggtttctccatgttggtcaggctggtctccaactcccgacctcaggtgatccacctgccttggcctcccatggtgctgggattacaggcatgagccaccgtgcccagcctacgttgttccttttaaaccaaactttaataatacggttgctaatgaaattaagtaaactacttaggaatgattgcttcaactatttattaagaggaaagagaacctgttcaatggctgctgtatactaggcactgtgtaaaacgctgggagagtaaagatgaataagacagtgctctcctaaaggagtaccatgtcttgttagggggatgctaatagactaaaggagagcacatttagcttaagcttttctttggatggttttttctgcactcattatgtaccagacactatgtaagttactgggatctaaagatgagtgacactgatcctttaaggaattcagggtctagtgaggatgctgttaatgaatgcttatagtacagtgccacgggtgccataacagtagtgcaaatgctgggaagtgtcagcaaatcagttccgccgccaaaaaaaaaaaaaagagttgatatttaagctaaagaatgaatagaatttatttccagagagattagaaatgaaagggctttctaatagaaccacttagagttataaagcaatgaaatagtacatcactcagggaatttagaggtatttaagtgtggctagtatttaggggaagagtaattgatgtggttgaagagtggcagagagattttatgatgtgcaaacaagcttaggttttatattgcagacgagggtgccattgaaggactttgagcaagggataacatgaaatttatattttagaaagattacactggtgaaagtgttcgggagaagttggaggaaaggagtgaagatttagctggtgaacagaaggctgtcataataatatggaaagaatgatagcttggccttaggccttgtcagtagggatcaagaaaaaggagtaactgaaagacattatagtgatagagtgaataagttaagtgaccgattatatgaggtgaatcatgaggaggagttaaaggtgttggcagggaatataggaggagaaaaaaggttgagagggctttgtgaatatatatatatataatcacaatatatatgtactcaatacttcttacatacatatattacagtgttatgcccagcaatgtgtatatatatggatgtatatatgtgtgtgtgtgtgtgtgtgtgtgtgtgtgtgtatatatatatatatacacaccacagtgttttttctttataggattttcaagacagtggcataaaaaatttaagagactttttagttcttgggtgtcaattaatattggcagcaaacatcacatgagtagacttttaagtaataagaaattgcaaatgctcttcctttttactaaaatatacttcatacccacaccaactctatataaaggctcttcattcttcttaacagtacaatttttgtgaaaccttcccagtctctttccccacacgttgttagtagcctcttgcaaatagctctgatacataacagtatttggtaagtatttaattatattctactttcccaataaaaatagagtagaaacaacataagcgtaggagtcatacagacctgagatctaatcatctttttcatttattagacgtttgatttctaaccgtatttgctcactggtaaaatgaatgcagtatctattttataagttacttggttttaagtattaaaccaagtaacatgtaaagtgcctgcagtagagtgtgtcacccagtaattgataaatgtcaggtaccattatttctaacttttagctcttaagggagtggggattattaattgtctttgaccaatgcctaaaacatagtggcctaagctgtgaacagtgattggataaatattagcttttttttttaattaacagttttttgttttggtggatttgaatgacatgtttaattaaaactgtcttttaatttcattttaaagctaaagacatttatttatttttctcttacccattgcttttactgattaggtatgaatttcagccctttatttccttctaattttggagatttttctcagaatatctctacacccagtgaacagcagcaacccttagcccagaattcttcaggaaaaacagaatatatggcttttccaaaaccttttgaaagcagttcctctattggagcagagaaaccaaggtactgattgtaaacagtcttttattgcttaaacattcacttttgtgattacatctaattatgtgtaatttgaaaacacaactagggaggacgtttgtgatgatttggcttgatgatgttggaaatatgaaactttgacgtatcagtagatgagatgccagatacttcctggtaaccctggtacattaaaagttgtttggaaggatgtggcgtaactcataggatttgttttgtctctaatttgatacctgtctttacggttaaagcagtttgctgttcaatgacttagggctggaaactaatattaactgctagaagatagttgttaagtgatgatccctttttttgattcctagctcttgattagaatcacttcctaaagcctattcaaatataatgttgagtactattagattataaaaacaacttttgtctcataagttttgaggatgcatggtattaatgatatttaggatttcttctgaaacagagtttttgactcagtgtgaaaggttggctccgttgaacctagtctgtcagatgtatctctctgattgtctttcctactccataaaaatatatataattcacattatatttctctttagctatgtgattaggaaggtctcaggctcttatattagcattttgacactgtttaattactgagtcattaactgggatttttttttttttttactcgattaaccaataactctgagaattccaactttgtattcaccactaggagtgctatgattaacatccgttactttgttgactccttttttttggttgttctatctttttcctgttaaatctcatgttgctctataaaggtattctgttgtcagaagcctaacacagtgttagttcacagttgccattcagaaatgattgttgaatgaatatccatcacgagcagtaaacatttattcaaagcttcggtgaatagactttcctattagaatgtccctacttcattattttcatataattgatagtaaaaaattactctggttttaaattatttatatcatttttaggatggatctgaatgtctaatattattttagatatttggcctacttcagattagacctcatttcccaaaatctcaactattgtaatttcatggaattaaatgactagagataaaaagtcagataaaatcctgtagtcttattcaggggtcagaaaacttttcctataaaagactagatagtattttaggccttgctggccatatagtgtttatcatagccattcatctgtgacagttttgcacaagagcaaccataggcaatatgtaaacatgagtatggctgtgttctgcaataacactttatttatgggcacagaaattttattttcatataattttcatttgtcacaaacttttaactttttttcttccaactatttaagaatataaaagccattcttagctctcaggtcatatggaaacaggcagcaggctgaatttggtctgtaagttacaggtttctaacccttgtcttgagttaaatcctgtaggtcactgtctcccagactattaggagcagtgttgttgttcacgctaggttctgtgataaagttttggacttgttgcccactaccacttttaagagatttataaagcacattggcatattaaaagttgtgagatattttacagacctgtttaactttgttttatgtgttttctccccaacctagacgaccgatgagtacctattaaatattaagggatgctagtgttcagcagataaaatttgagaaatgacagtagactaatagaactacggacttaaggagtggagaaataaattgctaattgaatgaccaattgtattcaccaaattcttgttctacttgaactgctttaggtgaacacaaatccatgtatgttcccaagccctctgctatagctctttttgagccattcttccaacttttgggtcttgtatatcccatcctcccttgatttttctttttgttgttttttctagaggcagggtctcactttgttacccaggcaggagtacagttgataacgatcatagctcactgcctccttgaattcctgggctcaagggatcctcctgcctcagccccctgagtgtctaggactggaggcacatgccactgtgcctggctcatttttaaaattttttttagagacggggtctcaccaacttgtctgggctggtcttgaactcctgggctcaagcattcctcctgcctccgccttccaaagtgctggagttacaggcatgagccactgcagctagcctgatttttctttcccactgttttccattgctaatgctagatctttgataaggaacttttgccagtaaaagtggtttagtgagatgggtccagaattaaaactaatttactaccttagcttatgtgatatttgcatatttaatgtgtatttttgtgaaaacatttttatagcctgttgacaattttattcacctaaatctactcgagtagactataaattcagtgtatttggagtttttgtaaactatagttgttaacttataaaaacttgttttcattggtaaggaataaaaaactgcctgaagaggaggtggaaagcagtaggacaccatggttatatgaacaagaaggtgaagtagagaaaccatttatcaagactggattttcagtgtctgtagaaaaatctacaagtagtaaccgcaaaaatcaattagatacaaacggaagaagacgccagtttgatgaagaatcactggaaagctttagcagtatgcctgatccagtagatccaacaacagtgactaaaacattcaagacaagaaaagcgtctgcacaggccagcctggcatctaaagataaaactcccaagtcaaaaagtaagaagaggaattctactcagctgaaaagcagagttaaaaacatcagtaagtgttgaaatttgttgaatgttgatcagtgtaaattttggtaatcttactttgacatgttgacatagatatagtttcagtaaggctagatgtgcaggtgctgttctagacttagttgaacagtcatttttagttacctttatatatataatttttttttacaaaataatattcgaaatagggtttaattttctggattaatgttgtaaaacatggcatttattttttgtacttcttaaagcttcagttttgtagattattgaaaaattgccaaatgcccacgtttactattttttttcttttgctattgtatcagatcctgcatccaactctttggtcatgacttttagatggattcttgattgattagtttaaagaatagtgggcttctaaatacattgcagtttttgaatatcatatgataaaaccagttttaaaacaggctggcttaagtccttctggaagtaaactcatattttactcagtcttgccattgaatgtcatattaaagttgtttaaaaaatttttttaaaattttctttatggtgttagtcatacctcttacaaaaataggttttctgtgatttttgaattatttactgaagtgtagtactaggttaaaaatagtttcattagctaaaatctgcagtgttacagctgaaggatattctttttatgtttgcaaaggatgggctatggccttgaaaggttgttctgagtttaaggagatagtatttggtgcctaaggctagttgcggtggctcatgcctgtaatcccagcactttgggaggctgaggcaggtggatcacctgagagcaggagtttgagaccagcctgaccaacatggtgaaaccccatctctactaaaagtacaaaaattagccgggcatggtgggcgtgcctgtaatccagctactaaggaggctgagacacaagaatcgcttgaacctgggaggcagaggttgcagtgagccaacatcatgccactgtactcccagcctgcgtgacagagcaagtctctgtcagaaaaaaaaaaaaaaaattggtgtttaagaacaaagtattctaggcttataatcaggaaagtttgaaatgcattgcacactgctaactccctttcttggaagttcacaacacatacaagtatagtaaatgccctgagaaatcctgtagtaagaaaatacacttgtaaactttggcaaccttcatcttaatcacttttggataatgaaaccttagaaaaatctaatgaaaaccacagatacaagagaatattggcacatttttaaaaatttcagtaattcatctatccttgaagtccttggctcctaccttgaaccccatgtgaagaatctgacggatggtttaaaaagcaagtttgaacaggagtgaaagaggtgacatttttcttagcatacacattatcagccttgaagtaattttctggttataaaggtttaggagaagctggtttatttagtaaattaattggtaatctgaagctattcagaaagttactgcgcttttccaagattactgttggtgctaccagagaagatttaagtagataatggccatttagagacagggccgttaggcaactcagaactttctatttcctagtgctttgccctcacagagatgctctttgtcatataaataaatgaagaaaagctgacattttaaatttcagcattgtctcattcagatagttaatttgaatctgatagggcaatacttcataaacttgagtttcacatgaatctccttaggaatacagttttaagtgcagattctgattcatttgacttggaagggacttgagagtctgccttcctaacagactctcttgtgttgccagtattggtctgtggactacacttcaagtagcagattttacaggaaccttagctaatttatggctatgaccacctaaccctagaaatattggtatgttttaatttttctgaaacccctttattctcgggaattacttttccaaatatataattcagccttttaacttcaagacaaagattgacattctgatctttgtgctcttgtccttcatattgaagtataaaaatacctgctgtttgaaatgtacagtcacatttgctcaacaagcattcaagaccatctgtcagtgagtgccccactttaaggcacacacacacacacacacacacacacacacacacaaataaaaggcttgatagcagaatcaaactatacatagcagagccgaagtaatatggggtaaaatcaaattagctcaatccttgctattcaaactctgaactgtggacaagcagcattacatcatctgggatattattagaaatgcgtgcttttgggcctcaccttatgccaactaaatcagtatgtatttttcttcagtatgcattttggcaagatttttggtatgaagatatgtacgtgaaagtctgaaaagtactgaactagaacactggtttatgtggtttttgttccttttgtgctataggaatggtcaagatttgttagaaaaaaggatttttactgtatctttaacctccacctcccgggttcaaacaattctcctgtctcatcctcccgagtagctgggattacaggcatgtgccaccacacccggctaattttgtatttttagtagagacggggtttctccacgttggtcaggctagtcttgaactcccgatctcaggtgatccacccccattggcctccggaagtggtgggattacaggtgtgagccacagcgcccgaccaatttttattatatcttaaaggaagtggtaaatagaggtgggtggggaaaagtttagaaagcctttcaaattgttactacagtaagaaaagtatagagtggggaacaagcaggatgagaggaattgggaacggatatgacagatatttcagcatagtgggaattacactgctgtcttgagagatatggtacagccagttatactgtcccatacttactagactgatccaaatatatatgtgttttttgtgcatgttgacattctttcagaagtagcttgataaatctcatataactttgtttcccatgatggtaatgtgttttaatccttagaaggtctttatatatgaaaatagatattgcatatgaggtaagaatatataaattatgtaataatcgtattttaaacttgagttcagacttagaccttatgagttgaaggtgatttcctgccttactgagtttttctgttatcagacctataatttgtttacactatactcttctgatattattagtagtagccaagattttcttcactcttttcttggaaaattggatagaactgttaaggtacagccttctgggttcttactgtccttgaatcttttcatttcttccttcctccctttcctgttgcacactaatgaagatggacatgaaatggacgtgaaacattaggcaaggcaaggcctgacagatttggctggtaaacaactagtcaactttttgaatttagacagttattaattacttaggcagagaaaaaagtagtccaaggtgccatttctctgtgccccttgtctcacacttgaaaagagtgacaccgaaataaaaggggctagctaacgattgtcccttgaatggtgggacaccctgttgctgaggaatcattgttatactgcagctaagcctgtttagtctgcaaatgtaccctacaaggttgaggaagaaaggtctcatgtttcattagaacctgagaggagatgggaaactctcctgacagaagcatcctggggcaagagagaggtgagtggaaaacgtccatccatatagcaacttctcacaagcctctcttgtccatgttccaggatgattccatggccttctgccaagacagcttgcactgtgattcagaccttaacctctctgcgctctttggacatgtgcaaggtctccagagtgccatggctgatctctttcccttcagtggaggctcaagtagaagtactgtttcttctactaatgtcaccccctcatgctgagaaaaacagaatgagaaagggaaagagtggtgaagtggcataggcgataacatccttatctctcatcagtcacacattagtaccttaactttggaaatctagcctttgatgtttttaatttgggactcatatataaaaccagttttttttttttctcttttcgtagcatcttaataattatagcctacttctcttcacagtttcagctattttggaggatgactgtatgtattcctttttaaagtacctattgggactccccactgagaatttcgtatatgccacattaagtgcattttaattttgattaaaatttattcatcacttttcatgtgatacagtaacagcatttaaatgtttaatttcacttatataaatgttcatgttagaataacatacttaaaatctttttctttagatcattgtatgttattaaatgagcaatagtactaccagtcatgtcattttacatattgcttttggcactcatactctttattgctggttttatattaagatcaataataatcaagaggtctctcttttcagtaaatttcatgcagactcggtggcagaggctaaactttagtttgagagaccagtgaaaaaacctggaacctaaagttgagatgatgaagtcttacataatggccttggaaatagagagggagggctgaatctagatgggatatcacagataataaattgacaatatttgggaaaattatttgttgttagtagacctgtgcggtgatctggaagatgcaagcaaggctttagggtctgctggctttttcctagagtgtcaggagcatggtcagatctccatgattcttggagaaagctatgttggaggagatccttgcaattcctcctgttattaacccttccccttacccccaagagtagcagtgttttgctactgcaagctactagttggcagaaaggttattgagtaagtaggtggcagtcttccttaaccctgtacatgggagagcattagtctttgcagctgaagagactaagcagtagagaagattcctctcattgtcttgatgagggactgacagcttgctagcgaaaatgttgcttgaccacaggaatgagacttccatgcaccctcatcttgccattattaaagctatccagcatttgggtccagccttaagagaaggtgagagtcatgactaggccagtgaatataacagtgcatataaaagggacctagttaccagggagaaaacagaagtagaccactgaaagaggcaaaacctagtgaaaatagaattattgaacaaaatattgaacaaatacacttgaacaaaataataagggcacataagcagattgaattataacaaattctttagagctagaaaaaaatgacattaagttttaatgtttagattatttaaaaaagaggacacgtgctattaagttccaaattacaggcctagaaaatcagggggaagaattatgtcattaaatggaatgaaagtactaacagataaaatcaagagaagacgattagagacttacaagaagttctgaaggggaaaataaaaaaccaggtggacaagcaataactaaataatagatgggatgaagaaagacttgagactgcagatcagaacagctggctgttgtctagccaggagagaagtgagggaaacacacaaacacctatgcagagtctggcaaaatccctgaattccaaggaaaaagtaaaaatcctctaagcttccatatgaaagaccaagttgcatacaaagaaaaagaaccaaaccgacaccaggcaatcttccttaccacacaagcagaagtagaaaaaagtggaatgacgctacacagttgacaaagaactgcaactcaggaaccttgtactcagccaaaggaccctccacatgtcagaatgaaaaggagatactagtttatcctatctgaggaaaactaaagaaacaacctgtgaatcaaaatagagacctttatacaggggaagataaagaagacagagaacagtttaataaagaaaacagtagatcagtctcactaatataaattcaaaagtaaaaataaaatattagcaaattgaatctgccattgtatcaaaagaattctagactatcaacactagagtttatttcagacatgtaatgatgatttgttaccaggaaatctgtcaacataatttattctatcaaagggacaaataatcatagaagctattctcatgagaatttgaagtaaaatgggtataagaaggcagttatgcctgtaatcccagcactttgggagggcgaggcagttggattgcttgagcctggtaggtggagtttgcaatgagccaagactgtgtcactgtacttgagcctgggcaacagaatgagactcagtctcaaaagaaaagaaaaaaaaaaaaaaagcagttatttgagtgtaataaagactgttagccagtgtacatcattgtaaatgaaagtactccagagatatttctatctcagttaggaactaaacagggattccttctgtcccaccatcattatttaccattatttgggaagcattaggtcaaataattggaattataatggtagtaaatattggaaaaggaaggaagcaagttttatgtgttcttttctagtggcatttttgtatactaagaaagcccaagagatactggaaagtagctcctagagttacaaggtaaactgttaaagtggctggttatggaataagtgtgtgaatatttttctctgttgtaatatccagtagcatgaaagtggagaggaacgctcttctcatagtagtactctaagtgtttgagtggggggtatgaaatgtaaggaacaaatttaacaaggaaagtactaggtctataaaaagctataaagtatttttgaagaacatcagaaagattgaacaaatataaaaacataaccatgttcttaagatggaaaagatggaaatgcataagattattaaataccatttctcctgagattaatacatacttttaatttgattccattttgagtccccagagattgtttttaaaattaaaaacaaaaaacaacaaagcttatgtggaaggacagatgcccaagaatagtcaagaaaaaagtgaagctagtgggacttgccttagcagatatttgatcatcctgtataacttgtgtttctaaatgaataaaaatggcattggaatagctaagttgaacacataaatgtccaaaagtaaaaccccaaatattggaatttaatatattgaccgatgtgtattttaattcagtggaaagagggtaggtatagccacctatccatgtggaacaaaaaaaaaaaaggaatttctaccttgtatatataccaaaatattttaaaaacttgaaaattttatagaatatatgtataacctatcagtgggtaagaccttttaaaccaagtcatgtcacataaaagataacaataagaaaggcaaatgtatttgactactctccctctataatggatatttgtatatatcggatgtgattcttatgtctcctaatattaaaaattgctaacttggaattctagtagagatttggggtcatgtaaggtctgccatatacttcgaattggaatatactcattaagatgagtatcaaagaacagtgaaggttagatttattactgttagctcatgcttccaaagggtattgcaaagatacctccaagacatatttactgttttgtattctatttataccaggccttcctagcattgtaaattgagttacctgtactgttacacaatggaaaccgatttcccttttagtttgagttagttgcaactgataacagttgtcactttttttactcaagggtatgaaagtgccagtatgtctagcacatgtgaaccttgcaaaagtaggaacagacattcagcccagactgaagagcctgttcaagcaaaagtattcagcagaaagaatcatgagcaactggaaaaaataataaaatgtaataggtctacagaaatatcttcaggtatgttcttttttggtttgcattaatataaggaggttttcagcttagatttgaaaagctataataaagcaggtgttaaaattggtgtttcacacgtatctatcatgtggaaggttttatagtggaaattatagtacacattccttgatactgaaaaataaaaactgaaaatattttgtgttatactatttaatagttttggacacattttaataaaattctaaacaaaggatagttacaattgtggaactcttcaaattctgaaaatcttatctgattaagaattagatatgaaatcatgtcatctcctgcttcaatcctttggcttactgtgcctacaggataaagtctgaatgccttcatggaacgtacatggccatcagggatttggttccttcctgcctctccagactcatttctcaacacactctgccttgaacttttttctttctgtggcactgaactggagtttttgtatagctatcacattctttcttaccttggtagctgtttttctatctcaagtcctttctgccttttttgtaagttcgtttctctgctggactcttaatacaattttaattctgaaactccattctaatccaagctaggatagtttcccctttctcctgttttccttgtagcttgtgtaaacctattttgttgccttaatcacattattatagtatttccctgtttgtcacttttttgagtcccttggcagcagataaaagcaccagtagtttcctaatttgtaaagagcatctcaaagaaatatggagagagagaggcaataacatgacattagactatagtggatagaccttaatctagtagctttcattgacattagtataaaatgcatgcgttttttgtttaaaaatgataacagcagctatcttttgtaccatgctccattattttcaaattaccaacaaatctcatttgagcctcataatgctgagttggttttatttccatttttcggaggaaacatggtcaaagagggaacttttttttgttttgtttttcagtactcataaaggctcagtaatgtaaactggtacaactttcctggaaagcttcagaagtcatgcccttaatccagtaattgtacttgtagtaatccatcctaagaagacaaaaggggaaaaaaaaaaaagacattaagatttagtgttgtctcaacagtatggtttcaactatgtataaacaaaaatttgaaagcaaaaaggccggaagaaaatgcatcaaaatgttaatagtggttttatcatctttaaactcataatgagcatttatcattttgtaatcagaaaagaaacatcacatttgtttgcattttgaaatgaatttctcaagcttacattgctaggaaatggtaaagctgaacttagaagctgggcttctgttaagtctgtgttcctttctgcaaaaatatcaatcctattcttctgaacccagaattttactaaaattttataattttcatctccttttactctctaccaaatagtgatatcttcaaaaaataaacagtccggtagaggtcgaagaaggacactaaactgaaagtcttaataaactgagtatcaattacttaaataataattggacatagtacttcaggccctattactgttacttagtgaaatataatgattgaattttggtgaattaaaaaatgtttgaatatataaatatacacaagtttacatatttacattctgaaaagattaaaaaaaaaatttttttttgagaccgagtctcgctctgtcatccaggctggagtgcagtggtgcgacctcggctcactgcaacctctgcctcccgggttcgagcgattctcctgcctcagcccactgagtagctgggactacaggtgcgtgccaccacgcccggctaattttttgtatttttagtagagacagggtttcactgtgttagccaggatggtctcaatctcctgacctcgtgatccgcccgcctcggcctcccaaagtgctgggattgcaggcatgagccaccatgcccagccctgaaaagatttatttttagttttaatcattaccctaaaattccttatagcatgtaaggcatgttactttttgtaactgtactcataacatatgattattagagtatagcataataggactgctagtattaaattacgcagtcttcttctcccgtgggtgttgtgggaggttcaccttgatgtgtatgcttctaaaaatgaatgatagaagtttattatgatagtcatcatcggtcgccttaatatacgtttatagcaaaccttttgagattttttttcttgagattatttttaagtagagcgtaagccttagttcaggcaaacaattttaaagaaattcgcttatttctttttttcattcacttattcatgttatagaccctgtctttactactcatacacattttatgttcatccttatgtctgccctttcctacagcacatgctaggagaatactacagcagtctaacagaaatgcatgcaatgaagcgccaggtaacaatctgcgtagttttggtgtccactttttgttaattttttcccattggtcctaaaggttttattgtcctgatttttttcttttttaaatttagctgagagtatatatgttatgtgactattgtaaaagataatttatattcataaaattctgaacccattcatttataattcttggtaaaatttgctgcttttgttttcatattctgttagtgtatgtaacctaacacattcataagggtaacagaaaccttttttacggtttagtacttgatttgaggttattttgtacttcttcaaagcattagtatttcttagacctagaaatatagttacttttatagtttatctttccatttcagtcagcatcttagaaaagtcatcaaacaaaacaatgattacatgcaaagacgtgataaataaagatcatggaaattacaaagattcccaaatactattttagtctctaatataagtattctcattaaatgtggttctttgtgatttagagttgtaaatatttttttaactcctcttgcagctttacatgaatgaaaagtaaaagccagtttgaatggaacctttaggggaatctaaagatacaaaacaaggatccagaactgacaaagctgaatatatcagtggcactttgaaaataaggaactctgaaaataggatataaaaacaagatggaattagagaaacctgattaagattagggatttttccagccaaagctaataaatttcagttcaggaggagaaactggcataaactttccacctcttgactgcagaagtggtgggggaatgaagcttgtgtttaaatggcatattcattatttgagaataatttaatttttaatgatacgcaatttagattgataattttatcacatacagaggtattaaatatgtcattaaacagttatagctttgaaatgaattttttaaattaagtatgattaaactgcaatatagtatataagataaaagtttgcatatcaaaattctttttacctggatttttcccattagaagagattgcttacagagataattttggttcctgcttattataataagtgtcatttttgtgatagttcataccttaaaactacgagaactttagtgtatcacttgattttatacctgtaactgaggcaaaatagggaagttgcatatttattgttacatataattaatatatttttctattgatatcttatattagtaatgttattatttcatgcttgtggaaattgagacctgaagatattaaattattagccaagtagtggaaaatttttctattagagcacattctttttccattttcttattcctctcacaaaaatgagtttttatgatcttgtatacttctttgaaagcgcaatgtattaagatactcaacattttaaatggatacctttgagtgtaataattttgtgttatcaacaagtaaatttagccgaattgtagctaaataatagagtgatgcctagattctgtgaaactgaaaacttcagttggatcacttgcctgctccaatatacactgagtatgtaaataagacacaatggtgaaattgacctattatgttaggttacagatttggttactcatcatcacagcacttttctgtgtgatgtatgagatttgataattagtagactatactggatagaccttaatctagtagctttcattggcagcattcagtttattctttttaacattaacaaaatatacaaacttccttttctgtaatgaagtccatattagcaaaagcaaaaaagaaattagcacttagcttatttctaagtgttgaaagattttcactgatttttcctataaaatgtataatattttctgtatattttatatgatcagaaataaacatggttcttagtaatgctaggtaatgttattcattaaagtttcatttttagtataaaatgcatatcttgatattttaagattttatttatcttggtaatattaagcttcttttctactttaaaagctctgaaatagaattgtctaaaatagaatttttagataatttaaagctgagagtaatgatactagctaataaaagttgtcatgaaggtacttcatcaatattaactttctggtcttttatgtattccagaaactgggagtgatttttccatgtttgaagctttgcgagatactatttattctgaagtagctacattaatttctcaaaatgaatctcgtccacattttcttattgaactcttccatgagctgcagctactaaacacagactacttgagacagagggctttatatgcattgcaggtatctggtacctaacataatttttcctaccctattatcaccttcttcatgattatctctggttgctgtcttagactgaagcatgtgccatatgaattttcatctgttctctatgtgctttcttgacattttatttaaaatttttgtatagcttaagtagcattaaagtattttttttgagtactttttcagtgttttgtctacttcctcacacttaacctgtgagggtagaaacagtacatttttccttccatctgcttttatttttgaatctgtaatataaatgaatgattaagcatgtatgttttatataaatgatgatcttattttcttatttaggacatagtatccagacatatttctgagagccatgaaaaaggagaaaatgtaaagtcagtaaactctggtacttggatagcatcaaactcagaacttactcctagtgagagccttgctactactgatgatgtaagctgataatgattagtgaattgtagatataattttagtatgcagtaaataaaagttaaatagattattgtcaaattgtaggtagacctaatatatttgattttcagctttttttaaaacttgggtataatgtgttattttattttgagggcgagatataatatgcaatcaaaatatggtagcaaacaccaaaaattatgtatgtatgatagattatgaggtctgagatagccatatttatgttgttattacccagtataggggctgactcttaaaagacatttacaaatgtatgttgtatttatttaagacattcagtaaaacaggtatcagattacagtaaaaacacttgaatgaataaatacaggataaatcaggtctttgggttaaaaaaaaaaaaaaaagcctagacaaaagtcttccaggaaaaaaattgtaatttaatgtattctaattcatggagaaaattttgaatagagtaaaaaggacctggaaatggagaagagtgctaaggagaatggtataaattcagtaagctgtgtcctccaaatagcacttagcacatcgttgattgaataacagtgacagaactgctagtatattgaggagataatgtgctaggtgtttgggaatcacctatttcaaggttcaggccttgattttattgtaaaatatttcatgtggtcgtgggatagcaaatacattcctttttttatgacaactctagcacctagagatacatgggtaagagtttcgtagttgattagcaaatatcagctataggtagagagttggaatttactgtttctgccttttgttgaagtgttaatactaagttttttctgaagccagtgttttctcaaaggattgtctttccttttcagatacagtaatttctgagtttttctgaatttttgctctttaacttctactcgtgtttaaaataataacttccccagctcatcttttctgtttaaaatgttttcccactggactctgactcctttagtactataacataaacctgtgtctaaaaactacatggttttaattaactttgcaatgtgaaatgtaaattagtgtcagtcagtgtttgctcctttggattgttataactaattgaaaattgtgtattcctttttgtgggaaatgaaatgcgacctgcttgaatacattaaaaatagatgttaaattatattaaggtttattgggcactgaaacaacttgagagagaatgaacagtctccattcctagacgtatttttcaataattttatatccttaattccagtgctttcacttttatccaagtttcatacaggcagcattacttccatttattttaagagattggagcacattggtttgcaccatcgatagcacattttgaaagttgagctacagtttaggataaagttaacctaagaaggttttaaagttaaatgaaatttaaagatgctgtactacttgatacgtaaggacttgggatagtaattgtatttagtattacttttaattaagtaactaaatcagttctttgatatttcttccaaaacttaaattcagcattaaggtcaacatcttccctttactaatgccatttaatcagcagcaccacaatatccagtgttgatactcacagatctgaagcagcagtgtccagtagaactttctatagtgatggaattgttttatgtctgcattgtctaatgctgtagccattagctacatgtggctagcaagtacttgaagtatagctattgtaactgaggaactaaattttaaattttatttaaatagccatatggtgttttttgtattggacagattcagagcctcattctctagatgcttctatgcttcttgagcttcatttttggagcttttacaaacgtatattaagatgtgtaagagatacctctcttgcctagggaagagagaaatgaaagtgaaactgggaatctgggagctgtaagtcaaggaggatggagtggagacactgaggtttaggaagaagaaaacacactttgtgtctcctgctcccgatgataataaaatggtaaaagcacatctgtcttgaagacttgaagcacatcaagtcttacttgaaacagtaaaaaaaatggtttccctattcctaaaatacgttccttaatgtctaaatttcctttaatcagggacaaatgtttgatttcataattgaagataggaaactttaaaaagatcattagttaagggaaagaacacaactgtaaaatgtcataatcaaagtgtaagtgagacaccctaccaccatcacactatacacaaaattaatttgaaatgacctaaagtcgtgtaaaagccaacactattaaaacttttaaaagaaaatgggaaaaaattatgaccttgacataggctaagttttcttaggacagagaaagcactaactataaaagaaaaaattaagaaattagacttaacaaaaataggaattttctgcttttcaaaagatactgttatgggaaaataatcccagtatatatatctgacaactgtctgatatatagactgtataaagcttacaactcagttgtaagacaactcagtaaaaactgggcaagagatttgaacaggcacttaatgaaagaagatatatgaatggctaatatgcaaattaaagccacagaaaataccacttcacatcaagaatggctaaaatgaaaagattgacaataagaagtgttggtgagaatgtggaacagttggaactctcacagtccttatgagaatgtaaaattgcacaaccacttggaaagcagtttggcagttgcttataaacataaacgtggcatgtgacccagcaatttctcttctaggtattcatccaagagaaatgaaaatatgcatcacaaaaacacttgcacattaatgttcatagcatctttagtcatgatagcctcaaactgaagcatcaagagataaatggataaacaaactgtggtatatctatacagtggaatactgtgcagccattaaaaaataatttctgaacttctgaaacacaaaacatggattcatttcagaaacatactaagtgaaaagtcagacaatgaagagtgtatattggctggttccatttgtatgaagttctacaaccagcagaactgatctacagtgatagaaatcatgagtagggtgtggtggagattgactgtagagggttgtgaagaaacgtcctgggccagtggaaatggtctttatctttagggaatctggttacatgagtgtatacatttgtcaaaactcatcaaactgtacatttaaagtgagtgcattgtatattaattatatttcaataaagtttattttttaaaaatgcaaatgatgttgtgatgttttcttttctgatgtgagacaaccaggtagagtaagctactagacattgttagcatttggagataggagaatgtccctgagagtatagaaataatgtaaaatgttaactttgccaaattagaatttaatcagtagctgtctttgtgtgtgtttatctacataataaatattctgcaaggctacttatatcactgttctctgtgactctgtattcagcgtttaataactttggttatattatcatcttgtttggacagaatactgaggaaacttatgaatatcttttaagtgtacaattttatgtaaatacttagttatctctgttagattattaatatgaaattcttagaagtattagtgatttttgtttgttttactgtaacttaggaaacttttgagaagaactttgaaagagaaacccataaaataagtgagcaaaatgatgctgataatgctagtgtcctgtctgtatcatcaaattttgagccttttgcaacagatgatctaggtaagcagaattgtttataatcttagaaacaactttaagttgatctggtccagtctttgaattggcgttgataaggaaacaagtctagaaaggcgaagtgtgtgtggttgaaagaatgtggacttaattatctatcagtctaaaatcaagaatcttctgactcttaaccctgtgagcaaatcatccaacatttttgactctgcatatactaaggaaatgggaattttaacctaccttgctatgttcttgtgaaaatataatgtaacttacttgcttgagttcagaaaatgttaatttccttttccttaaaggaaaggtcatcgtttaaggtcatctagttaattcatgggaacaattcaggcctcatctaatcatatttttaataaaaatattaactttgtaatttgagttaagcagtcagttttcttaaataacctgtagtgaaaacctcaagtaattctcaggcatagcaaatggttttggttgtttttttttgtttgtttgggtttttttttttttccccctctcccatcagctgtaaaacaaaagaggtttagagggttgcctggctgcagtggagaaaaaattcgagtcctagacttggaaaggaaatttaaggaaaagaaaaatatgtagatacttgatacgtttctagactgtggccaatcaaaagagaacctgagaattcagtcatttgccatccagggtgcttagttgataaaataatgtaatgtcctgttactctagtgtttgttcacgtgatgaagagaagacttagattatttcaaaggtatttttccactataaagaaaaggacttagccttgccctatcattacattcctactgttcgccaaaacaaaagtcttccttttgcttattgtaattattgaggactcagccttagctgacctctaagtaaatgcttatttgggtctgcattgagttcatcccattacagagaaaaattactgtgtggcctgccaaccctcaccccttaggttgtccctctctttctgagttgccagaatacttcgactcctacgtattttctttcatttactggtatttttttttttttcttacaaacctgcaccagtagctgtgtctgaagtagacatagaattgggaaatttcattgataggcctttttcttacctaatttgcttgttttaggttgcgttgttttcatcagaatttgcatgacattttggaattcacttgtattgtttaaatgaaacaacaaaatgaaataaatatgggcttcagagtttgataactaagtttaaatccttgttcctacattgaactgtctgtgaaagcttgagcaagttacttaaattttctgcaaatgaaagtaatgtcatctactatataggattattttaaggattaaataagtgtgacaatgtatatgaagtgctcaagtagtatagtgtgtagaacttgttaaagctaattttcctcccttttgtttggacatttttttattaatgcattttgaggaatatatgaaaaagttcacttttacatactcaaaaaatatttttgttccaaatgtaggtaacaccgtgattcacttagatcaagcattagccagaatgagagaatatgagcgtatgaagactgaggctgaaagtaactcaaatatgagatgcacctgcaggattattgaggatggagatggtgctggtgcaggtactacagttaataatttagaaggtatatatttttgttttcggtaggtttttggagaacaggtggtgtttggttacatgaataagttctttagtggtgatttctgagattttggtgcacccatcgcctgagcagtatacactgtacccagtgtgtattgtttgatccctcacccccttcccaccctttcccctgaaaccccaaagtccactgtatcctgcttatgtctttgcatactcatagcttagctaccacttatgagtgagaacatgcaacgtttggttttccattcctaagttacatcacttagattaacggtctccaactctacccagatggctgcaaatgccattactttgttcctttttatggctaagtagtatgctgtggtgtataaataaataaacaaatatatctgtctatctacacatatatacatataccacattttctttatccgctcgttgattgatggacatttggactggttccatattttgcaactgcagattgtgctgctataaacatgcacgtgcaagtatctttttcatataatgacttcttttcttctgggcagatacctagtagtgagattgttggatcaaatggtggatctactttcagttgtttaaggaatcttcatactgttttccatagtggttgtactagttagtttacatgcccaccagcagtgtaaaattgttccctttttaccacatccacactaacatctattattttttgatttttaaattacggccattcttgcaggagtaggatggtatcacattgtagtttgtgctttgatttgcattttcctgataattagtgatgttagagcattttttcactcaacatcaccaaaaagttttttggccatttgtgtgtcttcttttgagaggagttgtctatatccttagcctactactactacttttttttttttttttttttaatttgagcacagtcttgctctgttgcccaggctgcaatgcagtggcacaatctcagctcactgcatcctctgcctgccaggctcaagtgattctcatgcctcagcctcccgagtagcaggcattgtaggcatgtgccaccatgtccagctaagttttgtatttttagtagagatgggatttcagcatattgtccaggctggccttgaactcctggtctcaagtgatctgcccacctcagcctcccaatgtgctgggattacaactgtgagacaccacacttggccttagcccactttttgatggttttttttttttttttttcctgatttgtttgagttctttgtagattctgggtattagtcctttgtcagatgcgtagtttacaaagactttctcacactctgtgggttgtctgtttactcagatgattatttcttttgccgtgcagaaactttttagtttaagttccatctgtttatctttgtttttgttgcatttgcttttgggttcttggtcatgaagtctttgcctaagccagtgtctataagggtgtctccaatgttatcttctagaatttttgtggtttcaggtattagattttgaaggtatattttttattgattacaagtaataataattctatgtaaaaaatttaaatatgtgatatctaatggtggttttattactactttattttaattgataggggtgcttaaactacaaacatgtttctttgtattatgttagcataaaatcatcaaatttaatatttttcaaatttcaacataaaggcatatatgtatatataataggctttgttaggctaatgtattttctttttaaaaattagaaactcccgttattgaaaatcgtagttcacaacaacctgtaagtgaagtttctaccatcccatgtcctagaattgatactcagcagctggaccggcaaattaaagcaattatgaaagaagtcattccttttttgaaggtaagcaattattttaaaaaataaacgaaaccttctatgttttgttttttaattcatacagaagaccttattgtgataaagttcaacggtataggtaaacaacaacaaaaaaactatcacccataattttttcaccctaccaacattctctgaacctttcagtaatattttatacacatgtgcatattctgcctttttcatttactatatcataaacttctttctagatcattatttttctgctgcattttttcaggatttatcacctttatttttagttttagtttttgtgagtgtatagtaggtgtgtatatttatggggtacatgaaatagtttgatacaggcatgcaatatgtaataatcacatcatggtaaatggggtatccatcccctcaagcatttaacctttgtgttacaaacaatccagttatactcttttagttattttaaaatgtataattaaattattgactgtagtcaccctgttgtgctgttaaataatagatcttattcattcattctgactactttttgtacccattaaccatcttccctattccctactacctttcatagcctctggtaaccatccttatacagtttatctccatgagttaaattgttttaatttttagctcccacaagtaagtgagaacatatgaagtttgtctttctgtgcctggctaacttcacttaacataatgacctccagttccatccatgttgttgcagatgacaaggtctcattattttttatggctgaatagtactccattgtgtgtctgtaccacattttctttatctgttcatctgttgatggacacttaggttgcttccaaatcttggttgttgtgaacagtactgcaacaaacatgagtgtgcagatagccctttaatacactgatgtcttttcttttctgtatatacccagcagtgggattgctggatcatatggtagctcttgctgtattttcagttttttgagcaacttccaaactgttctccagaggggttgtactaatttacattcccaccagcagtgtatgaaagttcccttttctccacatcctcgccagcatttattattgcctgtctttgggataagtgccattttaacagaggtgagatgatttctcgttgtagttttgattgtcatttccgtgatcatgttgagcaccttttatgtgcctgtttgccatttgtatgtcgtcttttgagaagtgtgtcttcagatcttctgcacattttaaaattagattattagattttttcctatagagtttgaactctttatatatgctggttattaatcccttgtcggatggtttgcacatattttctctcattctgtgggttgtctcttcactttgttgtttgtttcttttcttgtgcagaagctttttaacttgatgtgatcccatttgtctgcttttgctttggttgccagtgcttgtggggtatcactcaagaaatttttgcccagaccaatgtcctgcagagtttccccactgttttcatataatagtttcatagtatgaggtcttagatttatgtctttaatccattttgatttgacttttgtatatggtgagagatagaggtctagtttcattcctctgcatatggatatccagttaccccagcaccatttattgtgaagagactgtcttttccccactgtatgttcttggcacctttgttgaaaatgagtttattgtaggtatgtggatttgtttctgggttctctgttctgttctatcggtctgtgtttctgggttctctgttctgttctgtcggtctgtgtttctgttgtttgtatgccagtaccacgctgttttggttactatagctctgtggtataatttgaaggcaggttaatgtgattcttccagttttgttctttttgctcaagatagctttggctgttctgagctttttttgtggttcctataaattttaggattcttttttctctgtgaagaatgtcattggtattttgatcacaattgtattgaatctgtagattgcttcggggagtacagacattttaacaatattgatttttccaatccatgaacatggaatatctttccctttttgtgtctttttaaatttctttcatcagtgttttatagttttcattgtagagatctttcacttatttggttaattcttaggtatttaattttatttgtgtctgttgtaaatgagattactggtggcatatagaaatgctactgatttttgtgtgttgactttgtatcctgcaactttactgaatttgttgatcagttctaatagtattcttgtggagtctttaggcttttccaagtataagattatatatatatcatatacaaacaaggataatttgattcttcctttccagtttggatcccctctatttctttctcttgtctgattactctagctaggacttccagtactatgttgaataacagtggtgaaagtggacatccttgttgtgttccagatcacaaaggaatggctttcagtgtttccccatttagtatgatactagctgtgggtctgttgtatatggcttctagtatgttgaggtatgtttcttctatacccagttttttgagggcttttatcatgaaaggatgttgaattttatcaaatggtttttcagcatcagttaaaatgatcatatgggttttgtccttcattctgttgatatgatgtattacattgattgatttacctatgttgaaccatccttgcatccctgggataaatcccacttggtcacgatggatcatctttttaatgtgttgttgaattccgaggtatcggttgtaatgtctcctttttcatctctgatattatttgggttttttgtctttttttcttagtctggttaatggtttgccaattttatgtatcttttaaaataccaactttttgtttcgttgctcttttgtattttatttcaatttcatttatttctgctttgatctttattatttcttctattttgggtttggtttgctcatgcttttcttgttttttaacatccattgttttcgtatctgttatatgtatgtttttggatttcaggttaccatgaggattgcaaatactgtcttataactcagtattttaaaccgataacactgattgcataaacaaacaagcaaacaaaatgaaaacttatgcaaatgttaactttgtttccctgctttttaactctttgttgtttctctttatatcttactgtaccatgtcttgaaaagttgttgtagctactatttttggttggttcatcattttgtctttccacttaagagtagtttacacaccacaattacagtgttataatattctgtgtactttctattactggtgaattttgtaccttcagacgatatcttactgctcattaatgtcttcttttagatggaaataaagtatttagtatttcttgtcagacaggtctggtgttgatgaaatccctcagcttttgtctgggaaagtatttctccttcgtgtttgaaggatatttttgctggatgtactattctagggtaaaagttttcttccttcagcacttgaaacatgtcatgacactctctcctgacctgtaaggattctagtgacaagtctactgccagatatattggaaccccattatatgttatttgtttcttttctcttgctgcttttagggtcctttctttatccttgatgtttggcagtttgattattaaatgccttgagatagtcttatttggattaaactatcctggttttctgtaaccttcttgtacttgaatgttgttaagcttactacctctgtctctctctaccccctctttaaggccaataacttagatttgtcctgttgaggttattttgcagatcctgtaggtgtgctttattgtgttttactttttttttcttttgtctcctcaagttgtgtgttttcaaagagcctgtcttcaagctaattctttagcttgatcaattctattgagagattgatgcattctttagtatgtcagttgcgtttttcaactctagaatttctgcttgattcttttaaattatctcaatctgtttattaaatttatctatgaatatagaattctgaattcccggccaggtgctatggctcacacctgtgatcccagcactttgggaggctggggcgggtgatcacttgaggtcaggagtttgagaccagcctggccaacacggtgaaaccccgcctctactacaacatacaaaaaaaaaaaaaaagtagctggacatggtggtgcgcacctataatgacagctacttgggaggccgaggcaggagaatcgcttgaacccgggaggcggaggttgcagtgagccgagattgtgccaccacactctagcctgggtgacagagcaaggctccgtctgaaaaaaaaaaaaaaaaattctgaattcccttcctgtgttatcttgaatttgtttgagtttcctcaagacagctattttgaattctctgtctgaaaggtcacatatctctctccaggattggccactggtgccttatttggtccctttgttgaggtcatgatttttggtccctttgttgaggtcgtgattttctgtatggtcttgatgtttgtggatgtttgttggtgtctgggcattgaagagttatatataggccttgtatcttgtaggcctcacagtctgggcttgtttgtgcccattcttcttgggaaagctttccaggtattcaaagggacttgggtcccaagcccaaaaacactgtgctttttgcagactcatagcggtataccactttggtgattttggataagatccagaagaattctctgaattaccaggtggagacttctgttctcttcctttactttctttcaaataaatggaatctctgtgttgaaatgcctggagctggatggagatggggtgatggaggcacccctttggtgacttaccactgtgactgtgctgggtcatacctaaagccagcacagcacagcactggggcttgcccaagaccctctgtaaccactacctgactaccgcctaaatttgcctaaattcgctcaaggccctagggttcctactattagcaggtggggaagccagccaggtttgtgtctttcccttcagggcagtgagttcccccaggtccctaatgggtccacagatactgtccttgagcttagaaatctacctggtattctgtcctactgtggctaagctggcctttaaaccacaagacaaagtccttcccacttttacctctgctttccataagcaaaggagtctctcctggtggctaccactgtgaccaccggcccatgagttctgctaatattcatttaaagcccaagggctttttagtcagcttgtggtgaatgctgccaggcctgggactcacccttcagggcagtgggctctcctctggcccagggcaggtccagaaatgctgtccaggagccaggttctcgaattgcggatcccaggagcctgcttggtgctctaccccactgtgatcgctctggtacttaaggtgcaagacaaagtcccctttttcctctacttttctcaagcagaaggaatctttcaccatagccatcacagctcagtatacgttggatctcacctgaagccagaacatctctgagtctcacccaaggcccatggcatactacatgggtatcactgtcagttattcaaggttcaagggctctttagtcagcaggttaagattaagccaagattaatccttccaggactgggtctttccctttaaggcagtgggtttccttctgggccagagtgtatctaaaaatgtcatcttggagctggggcctggaatggcgacctcacgactctgccggtgccctgttgtagctgtggctgagctggtatccaagatacaacacaaagtcctttttactccttgctctcgtctcctcaagcagaaggagtcacttgcattgctgcagtcagtgctgcctggggttgggggaggggtggcgtcagcaattcaagatggtctttcctaccctcagtgtccctttcagcaatacaaagttaaaagcaggtaccatgattgctcacctggtttttattcttataatggtgctttttttgtgtgtagttgttaaaatttggtgttccagaaggggaagatgattggtggaggcttctgttctgccatcttgctccacccctgcctttttttttaatggatccacaacattcattccaaaatatttataaaatgcctacttaatgccaggtttggcagacctagcagtgaacaaggcctttgttctcatggagcttgcatgctagagtgggaatacactctgaaataacataagtaaataaaagacatataagtaactgtttatcagttaatgatacaggccatgctcagaattaaaatttggtgatatgatggtgtctgttttatattggatgatcagggaaagcttctaatgagggaacatttaagtagagatgtgactaaggagccagtgtaaaccaggattgttctagacagtgcactggccttaaggtgagaattagcttcgcgtgttgaaggaactagagggaaagtctatatggttggaggatatttgtatgagactaagttgaaagggaggcaagggctaattgtataaaatattacaggccatggttagaagtttggactttgctcaaagtttgaagggaaactcctagaagattttaagcagagaaaaaaagtctggcttgtttttagaaaattgattataagggggtcaggagtgcagtgagatcagaagagaaatgatagtggcttagataagggtggtgataaagaaatacgtaattgggatatagttaggaaatcagtaggtcctactaatgggtagagtgtcgagagagagagaaaactggctaggaggaaatacgatttaccaaaatgaagaaggcttgggagaagggggagatgaagagctctgttttttttgaggggggtggggtttgagacagaggctcactcttatcacccaggcgggaatgcagtggcgcgatctcggctcactgcaacccttgccttctgggttcaagcgattctcccacctcagcctcccaagtatctgggactacaggtgcctgtcaccatgcctggcttgctttttgtatttttagtagagatggtgtttccctatgttgaccacgctgacctcaagtgatgcacccgcctgggcctcccaaagtgctgggattataggctcgagccactgtgccagccaagagttttattttgtactttaaaattgaactgtcttttagacaatcgtagagaggtcaagtagtcatttggttactcagctaattccaggcacagctggagatagacataaggtagattatagcatatagctgctgcctaaagccagggcatttgatttgagaatagaaaggggccttgcaactgtgatgtgggaccaggtgattcagcatttgtaagttgtacaaaagcggagccagggttgaccaagaaggactgcaaggagttagttatgttgatggctgctatgaggtcaagtagtcataaaatacaattttctattaattattttttcagtccctgttgttaaatatttgtgtttattctggtttcttttccactattacaaacacttattgaatgattgaaggtaatctgtttacttttgtttctctagaaacaatttttagacataaaatttttagttcaaaggtcataaacatttttaaagctttttagacaagctgattgtccttcagagaaactaaccagtttatattcccatcaacattgatagtatcagactggtaagcagtactattaatttcatttaacaacattgatcagggcagatggagacatgtgcaacaaatggaataggaagacaggacttctttctgagatggcattcattacattctaatttaaaatggaagttttaacaattagaagtgaaaagtaattgttttcttttcatctagatatggtaaactacaaaatacattgtcactgggctagtttcttatattgtactcatacttttctttgtaagacatgtaccacagagaattgcttccattgtgctcatatttcttccctcagcagaagtaattgcttttttttggaatgttttgagagaagagagatctttgagaaagcacctgtagaaactgctttctctgtatctgactttacagctgagaggaaaaagtcagctgatcgtgtccagattattccatgtaaaaacagaaacacgtagccttgttctgggcaattgcaacagttcctaaatggccttactatccttttgccgctgcttctaacctttcttttttttttttttttttttttttttttttttttttttttgtggagagatctgttaaattttttttttctttttttttttttcttttttttattatactctaagttatagggtacatgtgcacattgtgcaggttagttacatatgtatacatgtgccatgctggtgcgctgcacccactaatgtgtcatctagcattaggtatatctcccaatgctatccctcccccctcccccgaccccaccacagtccccagagtgtgatattccccttcctgtgtccatgtgatctcattgttcaattcccacctatgagtgagaatatgcggtgtttggttttttgttcttgcgatagtttactgagaatgatggtttccaatttcatccatgtccctacaaaggatatgaactcatcattttttatggctgcatagtattccatggtgtatatgtgccacattttcttaatccagtctatcattgttggacatttgggttggttccaagtctttgctattgtgaatagtgccgcaataaacatacgtgtgcatgtgtctttatagcagcatgatttatactcatttgggtatatacccagtaatgggatggctgggtcaaatggtatttctagttctagatccctgaggaatcgccacactgacttccacaatggttgaactagttgacagtcccaccaacagtgtaaaagtgttcctatttctccgcatcctctccagcacctgttgtttcctgactttttaatgattgccattctaactggtgtgagatgatatctcatagtggttttgatttgcatttctctgatggtcagtgatgatgagcatttcttcatgtgttttttggctgcataaatgtcttcttttgagaagtgtctgttcatgtccttcgcccactttttgacctttcaactctcctactagagttgttagcacttctgaggccttggcacttgctaatacttctgcctggaatgctcttccttcacatacctacctgcatggcttgttttcttgaactcaactgtttggtcaaatgttaacttttgctgagtaaacctctgccttatcctttacctgcttagtgcttgcacgccacctttaacctatgtaatatttgtctgcctctccatgctaaaatacaagatccatgacatctgagatgttaatctcttttggtcactgtccaaaaatagtacatgcacattgtagacactcagtaaacattaatgaattaataaatgactggaatcttcaaccctcaactgtagttgagctctttagacgctctaagtgtgaaaacaactggcccataggataaagaccaggttcattgtcactcataaaaccttttacagcttggtctggcctcttaagccttgtgtcctacttgacattattgaaaaaggcacattgcccacattatgtcctttacctagaatgaccttctcctctttctctgtcagtttctcctgtttttcaggagccagcccaaatgttattgcatgtgtttacaggcagaattccttcctctcttcactgttcctgagatactggattcatgccttcattatagcacttatgacaaaggatcataattatttgtatctcccccctagaatagtatctcatagtacctacagccaagaagcacttaagatactggataaaaagaatttgagggataaggcataaatacatcagttttaccaagtgttttgtgaatttatttcctgttacttataaatatatgtatatatttaccttccataaaagaatatacttataaattttaagaatatagattttttatatagatatttatctcagagcttgaaaccattgcctcaagtgaattggtttaaattttcttagttaatgcttgctttcatcttaggcctaaagtattgcctttttgcttttatacttttattttagcattaatagtacaataaatatttgtcaacatgtcttttaaaaactaataggtatgcttgtagtaatatttatttgatatgtacagttactttataagggttaaaaaaaaagcctaaatgatctatccttatgcttagggagtgcagccttcagttaggaaattgattgtttttacttttttgtgtctgatttgatggaagaattatgtaagttacatgctatctgctcagaaactgttatacaataaaatatttaatacttgagcgaaatagaagtcaccttgagtctgtgaaatgtttaaaaagtcttgaatttaaaagaattacattttttaaagtgatttttcttaaatgtctaagatattaggaaatatcaatggtattttagttggctaaagtggctagtgacactcatttaataggttttccatttgaccttttaagcgctactagcatatctagagttacctaaatcacaacacttatcttgtcaccttgtgtaaaatctaaattgttccttctcactttacctgtgtagccctgatttaagtgatttcatttcatgaggaaatgaaataataaatactaatttagcatttcaaaaagtgtctgaggccagtaaagagtagaactaataatctgattttaattatttatgatgtctcatttcacttcagatcttgactttttttgtaggactgtagaacttctttgttaattatgcccaggcagcattacacccagtcacctgagttagacttcttgactctctttatgtcatcactagtgagtcaaaaatgtattctcctccttagagtcatcaatttgacttcactttcttctttctagtagcatgaccttaattcatattcttaccttttgcttagactacctgtcgtaataggcatgaagtgcatttttactaagccgtgtcctacccaaactccttagtcttcaagtggcttcactgctggatctggtgtgctttccccctctagctactctccatctaggtacattcacttcacattattcaacattttccatatctactgttactttttcacgtattagctgtttgtacaagttgtcttgtctatccaagaggtaaaatactttcactcttttctgcctggctgaaatatttcttcagaaatatttgttgttgcctccagtatgctcctacagctccttagagcacctagtgggtgctttttaaaaatatttatttattcagtaagtaatgtctcctgtgagccactgtattttgtgataaataagaatacctgcagttaaaaaagtgttatctaccagacagcacggagcttatagtgattatttatatacgtatctgactcctgcatagtatttgactctctgaagacagggacagttgtgttgttgttgttgtttttttttttttttaaatcgcctgtcttgacacatacattattttaaatgagcttaagtctgagaggggaccttgaacatctagtttggcaccctcattttatagatatgtattggtgggggggactgaactgagaaaaggtttaggatttgcttaaatggatttagtagaataagaaggattagaaccttgagattacttgatatcgatgatttatggactcaacctcagaaagttaaccatgattcatattattttgtagctcacacatgcttctcaaggaagtttaagaagagacacttgactgaagtgatttgttaagaaagttagggggtgatgttaaccctcaagacatttcagaatgtctaaaggtatttttagttgtcgaggtggtgtagggaggaggtgttactggcatctagtgggtagaggccaggatgatgccaaatatcctacaatgcacaggatgtcaataatgtgaaggttgagaaaccctgagttagaaaataatagggaattgggtacaaggtgagtatgcttgtaagagtatttgaaattaactgaatgaaaacagaaagattggcaaaatggaaactagcatgaatagttctccttaaggtacagaaaagtacagaaagaaagtgctgaaaagtactggatcagccagttcttttactggccatcatctgctttcgtgggtcaaaattgccaaacctctcaatacgtatgaataaagtaggagtttggcttttcttatgaatggatatttctaaacagacatctgaaaattgaggagcatctacggcaagaaaattaaaaattaacattttgtattatatggattgattttctttttttaaacaataggtaagtttatattctaaccaactaggatttttctcaggagcacatggatgaagtatgctcctcgcagcttctaacttcagtaaggcgcatggttttgacccttacccagcaaaatgatgagagcaaagagtttgtaaagttctttcataaacaacttggaagtatattacaggtaagagtttatacttgtatgatttaccaatatgtactgtgtggtaaggttttttttcggggggtgggtgaggcattttcttgcattacacaatttattctggtggacatccaatctagcgtccatttgggatgatgttgtaatactttttagttgtcacttggttaaaataatattgtattattaggtcctgtttgtatcttcatttaatttggtcatctctaaggcatgtctcttataagcttttactggtttggtttatcttctcactgaaaacattttgagtttgaaatgtttacaaagtattctgtggctgtttctaaaataattggctaaagtaatttgactaatcagggaaattttggaagccagagaccagctggttgtagagactttttagggtgtaccagtacgcttaaattatagtaagtcagtaactgggagagaatttgccttctaggagacatttagcagtgtctgcagccattttgtttatcacagcaagtagtgtggagaaggtaggagggctgagaggaggacaggtactggcaactaatgggtagagaccaggaagaatcttgataaacatttgacaatacacaggacagtaccccatagcaaagtattatctggccctaaatgtcaacagtgccaaggttgagaaatcccatgttagtgttaataaaattaccttgtttattccatatgacaaacatctttacctttatatttacctgaatgtttttccattgagatagttcagtgatgtgtatttttactccacattaggtgatacatttttcttctcatctttattacagaattttcttatgaaacttggctttgcttcttatttctgtgtttaaactggttttagataatcactattaactttttttaaaccttgggcttgatgcaaatttgtatcactgtaattttccattttgttagtattaggactaaaggacaaattgtcctggccccgttagcagttattagtactaacagataatttctaaggactacaaaacattgatggtgttgtgcattgtaggaaactccattttagaataaggctgaaagagaaattataatttaaatattttttatcaagatccatgtagcccttcctcagttttgccttctatgataattgtggacagatcccaaagcattaatttctaaagacttttttctcagtctaaggtttgactgcttttctttcatcccgttcttgattttttcacaagaggacatacatgaagaatacaagttaatttacgttaaatattgcccagagtattgaaaaatttttatgagctagagcttaaattaccatcttctacatttttccttctgaaacccgttcaagaattgttttttccacaaagcacccagcatatgtacgtttttaccataactgtactagataagatagtcttttggtgggggagaggagcaggcattgaacatcatagttgtttgcctgtttgctaaatagggtagtccatattttagaaggaaaaagaggagtggttttactaaaaatgtatacagtatacttccttatttgaagattctcaacctaaaataatcaaaagggtcagaatctactttaaagagagtttattcaagcacagtgttggagggatagctgcctgggaagcacagattccaaagaatagacatcagaagtttgggatcatttatatcaggggtccccaacccccaggctggtgagcagcaggcgagtgagcaaagcttcatctgtatttacagtccctccccacggctctcattaccgcctgagctccacctcctgtcagatcagcagcagcattagattctcataggagtgtgaaccctactgtgaactgcacgtgtgagggatctaggttacatgctccttatgagaatctaattcctgacctgtcactgtctcccatcacccccatatgagaccatctagttgcaggaaaataagctcagggctcccactgattctacattatggtgagttgtataattatttcactatatgttacagtgtaataaagggcacagtcagtcaatgtaatgtgcttgaatcattccgaaaccttcccccaagctatggttgggggaaaagttgtcttctgtgaaaccaggtcctggtgccagaaaggttggggactgctaatttatgtggacagagtttagagaagcttaacagagtttcagcatctttctatataaggctttaatgcatagttacaacagtctaattagttgaggtgatgtttttgtttcagaaaaggtggaagatgagtcttttctgccccctgatctgacttaggtacaggacagtaaaggaggcagttaatctgtaacaaacatcagtggttgggaggcaggaggtctggtctcttgatctttcctagtcatttacagaacaagaacagtgaggaaaagagttaatgtgttgtctaagaagaagaaatcaccaacgttcaagttgccagggcttaacttcctccttgacataataaatgtagagggtcttgaaatcctattttcttttacatgatcctatatatcaacttgaatagaactaatgtttacttttgaagaaaaatttaaattagaatggttgtcttaagtaaaggaggaagctttaaacatgatcctatatatcaacttgaatagaactaatgtttacttttgaagaaaaatttaaattagaatggttgtcttaagtaaaggtggaagctttaaaagtattctaatggtacatttagaggtggaagattttgtcttttcctttcatagcacttagtatttattactgtagtatatattgtatctcctgtactgtcagggaactttctggtattagaaatccctgtctgaattcatttgtgcccagcagttacatcaaatagggactaaatatagatgaccatatatgttcttcccttgtgtatactctttaagcaggactagcaacattcccacttagtaatatagcagtattctttagtaatactaacaacctatctttccttagtaatcataaacattagttttaagtttttcagtacttaaaagtaatagtattttataattgaagtttactgtctttaaaaattatttggtttatctttgaataggattcactggcaaaatttgctggcagaaaactgaaagactgtggagaagatcttcttgtagagatatctgaagtgttgttcaatgaattggctttctttaagcttatgcaagatttggataataatagtataactgttaaacagagatgcaaaaggaaaatagaagcaactggagtgatacaatcttgtgccaaagaggtaaataacgttcattttgatttttaggataattgacacataaatacagttcttgatcattattattaactgaaatcacattttacctcagcaaaagtagttgtttttagtaataccagttaatcacattataagtcattacatatgctagtcacttgtggaatttgaggactaacagcagttgctaaagatcaggaatgcgggcaggaattgatgttaaatgtacattgtcagataaccagttcacattattgtcctgtattcaggtcttgaaagatgagagaaggactgggatctgatcctgggccagtgccaggtgcctgccatgtctgttattgatccctgtagattcttcgagaatatgcattacccagaggtcactcccagtcaacacaaatgcttattagttagggctttggttttacctccctgtagtttgttctgccttgtcaaattaattttgatcacaggtgagattggatgactgttctgcctcaagttgaggcataccaggaagccttttccctagatgtgtacccttttcctgaccctcttttatgagaaggaaacaagccaagacccaaacagagatggctcttctttcttagaatctaaagtagacgaagtcaggctgtccatttcacacttttcatgatatttattttctggatataaataaatttcagacgttgctaagagcttgatgaaaataaaacagcatgatactataataaatgattagaaagtaatacaggccaggcttaggtctataatcccagtactttgggaggctgagacatgagaaatgctaaattatgtatctaagtatgttgctaaattctgtgtaattgatttgttttaaaggctaaaaggattcttgaagatcatggctcacctgctggagagattgatgatgaagacaaagtatgtgctaattaatttttgcctaaaaatatggctgggcgcggtggctcacccccgtaatcgcagccctttgggaggccaaggcgggtggatcacgaggtcaagatttccagaccagcctggccaacatggtgaaaccccgtccatactaaaaatacaaaaattagccaggcgtgtgcctatagtcccagctattcaggaggctgagacaggagaattgctagaacctgggaggcagaggtggtattgagccgagatcatgccactgcattccagcctgggcaacagagctagactgtgcctcaaaaaaataaaaagcctacaaataatgcttttgaaacaatataaaattattttaacagctttcaccttaatgtttgaaagcagactgtatcatcaaatgacctttttcctgacacttttttattttaaaaataaaactagactatcaaaaatggttctttgtattttttattagataatgatcattattaatacgatagacttactatataccttttacacatgtactttaaggaattaattactcaaatatttttgtgtctaggacaaggatgaaactgaaacagttaagcagactcaaacatctgaggtgtatgatggtcccaaaaatgtaagatctgatatttctgatcaagaggaagatgaagaaagtgaaggatgtccagtgtctattagtaagtttaaaggctctgtactatctttatactttagttttttgtaggtcatttattggaacagtttggtggagtgtaacaagtataaaattaagtgtcaaagaactctgattttgaatttcactgtgaccctgactaaattatctagactttctgcactgtaagtttttaatacattctgtttgaggatttcagatactgtatataaagcatctgtgccatgcaggaatgcagtaagtggtagctattgttaagattatgtgctgaaatttactaaaaattgtgtattaatcaacttagatttgtctaaagctgaaactcaggctttaactaattatggaagtggagaagatgaaaatgaggatgaagaaatggaagaatttgaagaaggccctgtggatgtccagacttccctccaggctaacactgaagctactgaagaaaatgaacatgatgaacaggtattcccgtattgactgacacacttccatcagccttattttaactaatcaaacttccatcagccttattttaactaatcaaagtagatccttctaaatattcaggtttcatgaatgcaagcctcattaatatgcttattaaaatctgaaaaaccagtttattttttatgattgttttttagagacagggtcttgctcagtcttctgggctggagtgcagtggtgtaattgtagctcattgctcatagcctcaaactcctgagctcaagcgatcctcccacctcagcctcccaaagttctgggattacagacatgagccaccacacccatccaataatttatacgttttaaattatacactgtttttagtggtgtgattaaatttcacaccggccctctccttcctatttgggttgtgaatcattccattgtccggcatgtctacactgtatacactacctgcttgttaatcacttaatagccatctagggtagcagatagacttgcagtataacagtgttcaaacaacccttatttgacttaatggccccaaagcacaagagaattaattattctattattagttattgttaatctctcactgtgctccatttataaattaaactttatcatagataagtgtgtaggggaaaaacagtataaatggggtttggtgctatccacagttttggaacatacactctatggatgaggcggtgcttttttatatgttattttcctccctggtctagatcttttcttctggagttggatattttactgtgatgtgccttgttggggtcttttttcattatttgcagtggatactcagtgattgttttcaagttggtaaatttttaaattctctttattactgccacaccattttctcttttctctccttctgtaattatcagatattattagtactcatggattgatcttctgattttctcctcttttccttatcttttggttttactttgagagattttctttgactttaacacttgtatgaaattatttttatttcagctgtcatatttttaacttctgaacactttctttttttctgattgttactttttaatagtgccctgttatttcacagaagcattaccttccgttttcaaatgtctgctgaaccttggttctttatattgaacagtgatatatcaaaaagcaagttaaggttcttttgggcttcactgcaggtagggcatttggggagacagccagcatattcctacaaacttctaaatgttagtatctattggtcttttctttgagatggtttagattcttcaaattagggtccttcactgtcgtcctgcctggagtgtatgagcttggctgctgatattctgaagctagattgggaatggggctgaggtcccaccgttatacaggcatgcactagattattctgttttcagtattctatttaggttggtgcaaaagtaattgtggttttggtcattttcaatagcaaaacccacaattacttctacaccagtctgatactttactgtgtcatttgtgtctccacctctactcccagtggccccaggtttggggctcactagtttaatttctctaaaatataatctgccattttctgttgaggtgggaggagagaacctacgtaggcacattttccttaaacagttttaaacaactaccaccaccgtttcatctccagctcctgccccaacatcatcatgtcttcctttctagatctgttacttacagttatgaggtgaatctcagtttttgtttcctctccctgctgaaggcatttagctttgttcatcttcctctcgtcacttcctccttcattcccttcttgtctgcattaagtgtcttttagagtctgaaaaaaaatgaacagtgcagtctgttcgttccagttgtattatactgtgtgtgtgtgtttttaaggcaacaaggaaaccctttaacttagccatcttgaaatcacaaccaaagccgcctccttgaaatagttttagaagatacttttaaatttctttgtatgaaggtcttgggttggacaaaaactacacactagtaatcatctcttttatagtgaccatatatttcaggccctgctattaaaacatttttcccttctaggtcctacaacgtgactttaaaaagacagcagaaagcaaaaatgtcccattggaacgagaagccactagtaaaagtaagaaatctaaataagtctttgattttaagataatttcctttatttgctttaaagctaaaaaaaaaaaaaaaacacacacagaaaacactaaaattcttagtttgaaagtactttggacctgatgtatgtttttcttctccctataaatcctttgtagaaaacataagaatttgtttctataaacaataaagaaaaggtgacaaatatttacctgcacagacaaaaattctgtcaagagcatcgcatctttagatacaaataatggtagatttaaaaaaaaaatctatttgtaggccttattactgaaagtcctaattttttagaaatcaggtggatttcaggaatctgagtcttaaaatgctcccaggtgattttgatcaactaaatttgggaaccattgataaggaaaatttgtagttgccttttctttttggtcttaaatatcttgattgctcttattcaggcgtattgtctttattagtataatagtaaaatttaacattttttgcattacactaatgttaagactttcttttgatgacagatgaccaaaataactgtcctgtgaaaccctgttacctcaatatcttggaagatgagcaacctttaaatagtgctgcccataaggagtcacctcctactgttgattcaactcaacagcctaaccctttgccgttacgtttacctgaaatggaacccttagtgcctagagtcaaagaagttaaatctgctcaggaaactcctgaaagctctctggctggaagtcctgatactgaatctccagtgttagtgaatgactatgtatgtatcatttacatttccaaatatttttacttttcatttctgtgcatatttcttcattttcagattagcattctccacatgtaaaccattttgtgtttaggtttagaacatgttggaacatttttctaattcacactttaactttagcagaagggtaatagtgaattaagatgaccatctcaaaacccacatgctgttttataattttgagaaccaaagggataaaaagatttcatcttaagttcggctctgaagtggtaatgatgcatgaatcctcctttatcctttatactacctattcttctcaactgtttagaatatattgcaaattttcaataaacttaaaggtttacacttgggataggaaataaaacagtttgacaacagaatctttatacagtgaatgataaaaaaaaaaaaaactaggaaatctgtactcatgatagtacttactaaatgaaaattcaagtgaagcccaggtctgaaaaatacttgagcagaggaaagcaaaaacctttaaagtaattaatcttgcttaagctgcaaacataaatgaaacttcacttgggtcatttctgataaatgcttctgttagaaccaaagcttaaccccagcctgtcataagtagccccctaacatatggatatgtgactagggactttctgagaaggtacttgataaaagacaattttgtaattgcaaaccaagcaaataatttattttacttccacattttccaaataaatacttgcctctgatattttgtcagtggaacactaaatctcttttggtctggtgttcccacttcctgaattgcttcttactcaaataaactgtaaaattttattgtgtctcagatttgtcttttacagtttggtgtcagagtaggatttgaaagagaccccctgtggcctctggaagcatcgaggaaccaggcaaaaggtgtccattgtgctcactgctttctcgctgcatctggaggtcctgggtaagtccctctcggatttcaggctccacagtttgtgtcctgagctctctgagtttatctgagtaattttattttgagactgagtctcgctctgtcatccaggctggagtgcagtggcgcgatctcggctcactgcaacctctgcctcctgggttcaggtgattctcctgcctcagcctcccgagtagctgggattacagacgtgtgtcaccacacccggctaattttttgtatttttagtagagacagggtttcaccgtgttagccagaatgatctcgatctcctgacattgtaatccgcctgcctcagcctcccaaagtgctgggattacaggcgtgagccaccgcacccagctgggtaattttattttttactggatccagaggtcgaactagatgtttgacagtaactagactgggtccagttggcagcctcaggtaggtgaggtttagaaagatagggtattatgggttcattaacacctaaagactctgggacccctctttctagaactctagcaaattttatgtttagaaattaggaacatgaaactatgcctttaactatgcctttctggagaaatggttacactttaccagagaagagaagagttaaagttacagtggagaagttttaatctagataaaattgtttatggggacattagaaaagaagggatcctaaatgccttagaaacaatgggaagcagtttttgattgttgtatacaggcttctaaaagacataattccaaaattgccttgctaaaagattccttgctaaaggcaaataagacagatgaaaagcttaagcagtgaattgacaaccaaaataaaatgaattgtatgtagggagtgatttcactctgacctgttactctgcttatcctcctctaattattctgagtccactaacccatttgttcagtcatcttaatccttttgcacaattaccctttcactctggacgatgtgacagaaaggaagttaggctaatgctttgcttagttagaccctcagccaggacaccgaggtctggctcctgtaagtacttttacttctgggtcaaaagctgaactcagagccatagcaaaagattttccaaatcccaaggaaaatccaaaacagtttgctgaggaatgtagatttagaatgaccctgggcttcctgatttctgtcagtttctacgcatgatattagccactggggaagcatgttaatggatgactacggcaggatggcataagcctcagaagagtattgccaaccctttaagagctacttctgtggatagcccaaaagatgctacaaaaacaactggaaaacatctagaagctatccccatggtctttccacaaaagattgactagtccaaaaagttgaatctatttctgattacacggctaaattggaaatctcatttgttaaacattctggtcttaaaatacagcagggagtatttcctgcgggaactgaaatggtttttatggttttattcattaatagtctctgactagagtctggtgacttgattaaaaaacacaagattggatggcaagtcactgatatggctatattagtcaccatagctgaacattttgagagaacattagaactagaaaaaaatcagtttctgtaaagaggccattgaagaaaagagtctccacgcttgaccagtcctctaatggacctacctgtgttgggccagactatttcctcattagatgaagttcccaaggctgggccaggcatggtggttcatgcctgtaatcccagccctttgggaggccaaggcaggcagatcacctgaggtcgggagttcaagaccagcctgaccagcatgaataaaccctgtctctattaaaaatacaaaattagccaggcgtggtgacacatgcctgtaaacccagctacacaggaggctgaggcaggagaatcgtttgaacccagtgggtggaggttgtcgtgagccaaaatggtgccattgcactccagcctgggcaacaagagcaaaactccatctcaaaaaaaaaaagttcccaagggtttgactctgaagacaataatcaacaccaatgggacatcaagggattctctggtatgttactctccataaggcccttaaacaaacatggggaggaaactaagatcagcatcagtgggagtcacgtacagtgttggtggataccttatccactttcaaccccatgctaataaatcagccagtcccttggaggaaagaaaatatttcacgtttccaatcaagttcagagaatcctctgtgaaccagtctaaatgacagttggactaatctcagaaaagcatgccttcctacaatatgacactaaattgagagggcacttaaagttctctctggaaggaaagttaattttagagcttcctgacccttctaaacctgaactgctctgtttcctacaagcaggaattgatcatattgaaactcactcttataccaacctagacctttctgaagtacccagatgtttgtgggcttgtttctcaactgacaaagggaagattaaaagtggtaagcctataaaaatacaaatacattattccaagccattgcctaaattgccctcatgccccctagggtcagaggcaatccaagggctttacccagttatagaggatttaataaaacaattccttgtacttgtctctataatactataatcctacagttaagaaatccatcacacctttaatcccagcactttgggaggccgaggcgggcggatcaggaggtcaagagattgagaccatcctggccaatatggtgaaaccccatctctactgaaaatataaaaattagctgggagtgctgatgtacacctgtagtcctagctactcaggagactgaggcaggagaatcgcttgaacccgggaggtggaggttgcagtgagctgagatcgtgccactgcactccagcctggccacagagccagattccgtctcaaaaaaaaaaaaatatgtatatatatatatgtgtgtgtgtgtgtatatatatatatatatatatatatatacacacacatatacatacacatatatatatataaatatataacatataatatataacaaagttggagatttgttcaagacttaaacatacaataaattgtcaatccaagatttcctgctattccaaatcctaacactttgttatctaatgtgcctacagattctaaatggttcacagtgtaatctttctttcctctgcctttttcagtattccagtaagccagtagttctctgcttatacctggaagaaccagcaatatacttggactgtagtgccacaggggttcgctgaagctctatcttgtttttctcagacattataccaagacctgtcaaccttacaattccatagaaattgtattctgtctatatgtagataatctttcatacttttagcttacaatggacataaggcctcaatggcaaaactttagttctgtagagcggctgtcctcagcctttttggcaccagggactggtttcatggaagacaatttttccatggactggggtaagggggatggtttcaggatgattgaaatgcattacatttttgtatattttatttctattattattacgttatataatgaaattggtatacaactcaccacaatgcagaatcagtgggagacctgagcttgtcttcctgaaactagatggtcatatctggggatgatgagagataatgacacagcatcaggcattagagtctcataaggagcacgcaacctagatctctggcatgagcagttcacaatagggttcaagctcctacaagaatctgttgccgccagtgatctgacaggaggcagagctcaggtgagaatgtgagtgatgggagtaggtttaaataaaggtgaagcttggctcgctggctccccccaccactcacctcctgctatttggcctggttcttaacaggccctggactggtactgggggttgcagatccctgctgtagagtaaaggtccattacataggatgtgatctgactgcagagagaattttcctcttaactgaaataataaaaacaatccaagggttccctaggcccacaactaaggcagttaagggagttcattggtcttatgggatactgcagatcttgagtcccacatttctctgctggcttcccccttgcctgaatttagaaaaatctctgtcccagagctttgccatgggaagataattaggaacaagctttcaataaaataaacctggccttataaccccttcaggttcaggatacccaagttatttaaaacctttcactttgggattatcaaatatgataatccatccttaggagtccttactcagaaacgtggaggaagctactgacccattgcttattatacgttacagttaaatcgagttgtcagagcatatccaaaccatctaaaagcagtgacagcagcagctaaattgataggaactttatctgacctagtattagggaataaatgttacctacaagttacacgtgcagttgaaagctcattaccttccagtcagatccaacatgtcttaataagtagactaacattttatgatatccttctcctgtcaccttctaatctctatctcagatgtcagtctgcttaaccctaccactttgctgcctctgtctgaacaataggaagaccaaaactgtgtgtgtggtatcataactattgactcctcacattgacttatggaaaacttcattaaataattctgaataaatacattttattgatggatcctatgaaaaaactgtagagaagaaatactgagcaagacatgctgtaacaactcagtatgaactaatagaaaagggaattctttctcagtttaagtcaggacaacccgaagaattacgtgatctaagacttaaccatatagcaaaatgccaatcattttccatttatacagataataggtatgcctttggagtgagtgatgattttggaatgttgtggaaacaaagggtttctcacttgtagtggaacccccatcagtactggacctctgccagatgagcttctttcagctattctgctgccctcacaagtagctcttaataaaaatgatgctcatgctcgtaggactgaacctgagtatcaaggaaatgcatgtgtggacttttatggccaagtctgaaattgacaaaatatgcattttgaatgaactccacagaattgaccaagatcaaatcactcaggataatttgttcagtaaacaatgctgtgcacttgagttgaaacaacaaaaatggaatcttaaaggttgcaaatttcatgctcaacaaggactcagtgaaggcccagacagccagctggtccttcctgagtccttcaaactgtcattattattaaaggccctgcactctacaaaccatcatggtgaagaaaaacgtttcagattatgaaaaagattatgaaagcagaaatggcttacagcagtgtggcttgtcaaactcataaagctggaaagacccttaagatttctgccacctgctagaccatatgtaggtctgcagatggatttcattcagttgccaccctcattgaggtatcagtacattcttgcggtagtgtacctgtttgcaagatagattgggacttacccttatagaaaggctgatgccacaacagtagcaaaaaattcttaggaaatgtatttcctttatggggcttttctggagagatctccagtaataagggaactcattttcctgaacaggttatcagataaacaggattttcaaactcggtggcactaccattggccttgtcatcctcggtcttctggaaagcttgaatggacaaattgtatcttgaaactaaaattagctaaattgtcagctggattaccttggccaaaaattttaccactagccctaatggcaattacatcaacccctacagaaaaacacaaatttgaccccttatgaaataactggaagacctatgcctttaataccagaaccccatgtatcacctgtatttgttagctctgaaatgactcaatactctaagaccttaatggattatgcaaaagtctatttctaccagctgaaggaggctttttgtgaactgcctaccagtgatgatctatgactggcttccataacttagaacgtggagattggatcttttggaaacaacagcagagaaaaattgcccttgagcctcattggaaaggactgtagcagacagctcttactactcacaatgcagcaaaacttcagggttttcagccttgggtccatctatctcaagtagagagagcttccttagactcttggacttgacaacctataggtgacttaaagatataaaagggaaagcctttccctaggagcaggtggcatcgtgaagtaaacaacttaccaccacaatgaaacgactacatttaaaacttttctcattaagttttgatttggttttgcattaacacaaaatgttcaaacttttgttgggaacttttcctactcaaacagaatatcctctaaggtctgatgttcaaagaatagccactctcactcaaccaaagcaattgctggccatgtagtcatatagatgaatggaatcacaactaataccgaaatctactcccacacacacttgggtgagcaattggttttatgaaaaggtttggtatccttcccctagcaggttggttgatatttatggttgactgacttcgcactgggaagaagttacagaagcaaaggtatgtcctgtaactactattgattttattgctggtaattttatcactatggacagaaaaccttaatggaactgggcctaatctagccagggttccagtctccctatatgcagtcagactttatgatttaacaccaattagggagactgctctcctatataatgacacatatttaaaatcagaacttcaccatgatacccttgactatattagtagagaacggactgaaactgacattggttcaaaggaaactctagaggcaaatggaatacccctgtagtttcactgtatacaatagggtttttaagatcagtattcagggcatatttgaaaaggaaacaagtcatccttatttggcgatggtacccatgtgtaatacatagaagtgtttttttattcctctttctatttaaatcataaccattctacctggcagtgtgcagatgcagatatgacagagaataaccatgacaatcacatcattcccaattggtgggtaataggatctcctttgcccctttctctcagtaatactggattattcatcttgtatggcaacaaaatatataaatgttttcacctatatggtctggacactgtggtttgggctatttcctacctaaaatgaccagatatgactctttaaatggttgtgaaattcttaatctggggttgtttgtacatgaagtgatcccttacaaaagaactccctgtgatctcccaaactcgaatatatgaaggggttctagattttgttctttggtaagatcgctttttctttagctggcagtctctgaattggaaaaatggcttatggatatttcagcaacccttgaaaaaaagttttaatgatactttcgatactcttcaagcaatacaatctgagatgagtcatttggtctcactggaactccagtagaagtttagctgctcacagggatgagctttgggtgaaacgtattgtttttatgttaattagatattgttgccccaaatttaaaagatcttaataaatcagaattttttttatcagataagcaaggcctcctccattgatttattcagttggttaaattttaggcccctgggaatctttgcttagagggatctttaagttcttgctacagttactgtgttttcttcctttgtgctttatatccccacaaggggttcaaatgctttccagcagccactcacacgtcagatgattgccatcagggaagctaacactgtgtaaacttgatggagggtgcatgactgaatcccaacataacttttgatgataacaactttacctgacttttcatcccaacttctgtgtcagtagtggttacaggataatgctactccatttggccaccctcaagctgagagggcagccaaaaggggggaattgttaaagcaaaattaaaatggagatcaggcctgaaaatacctgaccaaaacccccataaaacaaaggcctttaaaacagccttaatcttccttgaattgcaaacataagtgaaacttaacttgggtcatttccaatcaatgcttttgttggatagaactaaaaggagtttgagagcaacctgggcaacatagtaagaccctgtctctacaaaaaattaaaaattagccaggcgtgagagtgcaggcctgtggtcctagctactcaggaggctgaggcgggaggatcacttgagcccaggagttctagactatggtgaactatgattgcccctgctgcattccagtctgggcaacagagtgaggccctgtgtcttaaaatttcttcttaaatatatatttacagttatgattcataatttcttagaaagggggcttataatctttgaaaaacgttagtacaaagagtaactcttctaactcttttgtttgcctcactacgagtacaattatacatttaaaacttcgaaaattactggttagatttattcttatctgatcattgtctagttgccatagaagacatttaattgaaattaagtcaaaggtagattataaaagctcttgaatttgaattttagtcagggatcctactgaatgtttttgtgcaaggaagtgaaatggtcaaatttatgggctgtgaagattaatctgctgactatagcatatactatcaagctagattgggggatctactattatataagtatgaaatataagctgaacaggagcagggtgagaaacagtgcaagaagaagaaaaacctaagatttctacttggataattggtagaattatgatactattaaaaatcagaagggagaactaggagggaaaaaaatagaattcaagtttaggaaaaacagtttaaggtgatcacaaaagacagttactaaattcatacctcagctttctaacagccccatcagagttgatacactgaaaagtttgtaagtggttacttacattctgctgggtacagctctcgtgttcagtaaacatatgaaaaaacaagagttgtctttctgtttttagtcctggttgtaactatttcttcagcatgtatgaactgcccccctgcctttttttttttttttttttgtgacaaaatggtaacagcttgacagtatgtttcacagctgtgattgtagcttttcctatgaactgcatatttctaaattattcatagagctgaatgtagaagaaaacgaaatgtgatagaattactgagaaaataattcactatttctttacatggatgactggtttggatctagagtatgtatttttttttttcattacattacaggaagcagaatctggtaatataagtcaaaagtctgatgaagaagattttgtaaaagttgaagatttaccactgaaactgacaatatattcagaggtatttagctgtctttaattaaacttgtctttacataacaaatactgttaaaatgaaaaatgatttgtatttttaattttcattccaaaggcagatctaagaaagaaaatggtagaagaagaacagaaaaaccatttatctggtgaaatatgtgaaatgcagaccgaagaattagctggaaattctgagacactaaaagaacctggtaagagttatcaatttaaatcttgccatattgaaaaatcattgaatcttcatactactattgtgttttattttttaaatatgctactactgacctgggagatttaagccaaatactagaaagaaagtgtaattctgtaagaattttagttcaactatttataaaacagtgtcagataatttttttctattcacatctttagttttaaaaaatgtagacatgctggctgggcgcggtggctcacgcctgtaatcccagcactttgggaggccaaggcgggtggatcacgaggtcaggagatggagaccatcctggctaacatggtgaaaccccgtctctactaaaaatacaaaaaatcagccaagcgcggtggcgggcgcctgtagtgccagctactcgggaggctgaggcaggagaatggcgtgaacccaggaggtggggcttgcggtgagctgagatagcgccactgcactccggcctgggtgaaagagcgagactccctctctgaaacaaaaaaaaaaaaaaaaaaaaaaaaaaaaaaaatgtagacatgcccatggtttaagaaaggtacaaaaatattataaatagcaaaaacccacttttttttttttttttgagacagagtctctgccaccgaggctggagtgcagtggtgtgatctcagctcactgcaagctcctccgcctcccaggttcgcgccattcttctgcctcagcctcccaagtagctgggactacaggcgcccgccaccacgcctggctgatttttttgtattttttaagtagagacggggtttcaccaagttactcagatggtctcgatctcctgacctcgtgatccgcctgcctcagcctcccaaagtgctgagattacaggcgtgaaccaccatgcccagcccaaaaacccactttttattattgatttttagttctttaggagactataactctaaatattatgattcttagtttttaagatgcagataatacctcttttctacccgatgacaagtatgtatctagccctacctctctctcctcctcctctcagtgttcatattatttttgtttgttctattttttactttcaattttggttaagtatatgtgcattttgttccatcaactttggtcattatcccttgctgctcctcctctgctttcttcctggttctctgttcagttttacccatattcttacattactaaggctattatatacgcttacattttgttttcgtaatataattaaatggttctataccttctctgaggttgcttctatataaatatcattcattgtagagccaagcgatagtctcagattttctgtatgagtctaataacacagctctggagccactcaatgtttcttgcatcaggatcaaagggttttctttttgttgttctccatcagttcatcagttgatgaaaattgcatgatatctcattgtttttgtttttcctggaaatggagttgaggagaaggaaagacccttcagatatcagaccttcagttaatttctgttttcagcccacttctacctgttagaatatggtacccttctcagttgcagcctcttgcaagtgtttgaactgcagcttcctccactgtcattgggtatgcttccatctgcattgagcattctggtaatttgttgatatcccctcttctgttttctcacaaccagtcttttgttggtgtagatttattctattctatagttgttttcttttcatagtggagtgtttttagagagacacgaagtatctgctcagtctgccttgttgaatcagaaacgcctcacctattctttttttactgtgtgctattagggaattgtattagcaagctaatttaggatttcttttataataacgttatattaaaagtaaaagctttaatgacagagaacaatgttaaattctagtaattcgataagtaatttataaagcatttttattctgtttttcagaaacggtgggagcccagagtatatgagatgtcttcagaggctcatctaactctgtccttacatactcaatgcatatatgaaaacaatactaaataaacatctgatctgtataaaaatgtaaattagtttgacactgcttttttgataggtgtggtcatttctccccatggtagtttaaaacatcagaaactgaattctggacagatttaagccttgacacactgtgtttttttttttttcccccttcttttttgggtcttcatttttttccccattgtgatgtttggtaacgaatttaaaatgtagttttaaataaagtttggacttatctataaagtatcttttttggaaattatattgaattctatacagcaagtcaatgttttatataactttaggctgctcagagaagagcaatggttaagagttagttagagaaatatattatttgttataaagcccatccattaggccagtcttccaactaatgccagtgttgctgctgttgggtctgatgttcttcttttagatacctgcaggtcctattcctgtgcaagaatagggcagattatcaagatatccaggatacctatgaagttattatagaatatttattaatccattgaaattggataataagtttagaacataggttctcagtatctagaacttacatcattatcatctgtttgttaggatttgaaattctggaaaatatttatctacatcgcctcagactaaaagtaaaaaaaataagctttatataattagggagatttctgcacagagaagtaacattgtggttaattttaaatgaaaaacttaactttttcaagtggggataaataatacaactaaatttctgtaatagtaagattctgtatgccttcagataaacttgcctattgagatggtaatttaaagccaaagcatagcagtttcttttgtgtgtagtgaggttgaagcagatttgcaggtgaagtattgaaagtttatgtgactttaagtcagcttttgaaaagtgattgatttgctttttatcccaaactgtccatatacccagtaaggcttcaaaaaaccagtcaacaatgagtaagtcaatcttatagattcttcttcctcgaataaaatacaaagaattagttccaataagtattttaactttgttaacaactgaaataccccataaaaaaagaacttgttgagagtatttctttaaaatggttacttgctgcccaggcaccatggctcactcctgtaatcccagcaccttgggaggccgaggcgggcagatcacgaggtcaagagattgagaccatcctgcccaacatgggggaaaccccgtctctactaaaaataaaaaaattagctgggagaggtggcacgtgcctgtagtcctagctacttgggaggctaaggcaggagaatagcctgaacccgggaggtggaggttgcaggttgcagtgagccgagatcatgccactgcactccagcctggcaacagagcgagactctgtctcaaaaaaaaaaaaaaaaaaaaaaaaaagttaacttgctgtatacctcagtgtaatgtccattcaaggagtattaaatgaggatttccctgcgaggacatttactgtattgctacttaaattatggaagacaatatatcttcaactttaataaaacctattcagaaaattaccaattcagaattcggagttcttatccaggtgctctaactaacttcagggaaattggaacaataagttatgttacatgcacactcaaattctttattttctccactttaagcaggaaagggtaaaaactgttttggtactcaagcccagccttacatactgtgtttctctctctgtctgcatgcatattaaagtggaaaaattgtatttatatcttagttattaccatagtacctatgaaccttatcaaaattgcttatttgactggtgttacagctgctattaatctaagtctattgtttttctattttagtagataatttagttttaaaatacgtagggtttgagagcagatatatttatttaatctgttttctctagtaactattgctgaagggttaggcattcagtattcctatttgtcctaattttgaagttaaaaattttggttacagatagatagagggagaaaagttcaaaatgagtgagagagaactttatgcaggttgagataatgcctaaaataatgagctggccagactgtggaggtactctttgtattttgtaacattgactttgggtaaatgctttttcactgttaataaatatatatcctgtatacaaccctgaattgtattttcttttaaattcacatgctcatttatgttttagaatttgttccacagtggtgacttgacagctttaaatgtcactttgggaggccgaggcaggcggatcacaaggtcaggagatcgagaccatcctggctaacacggtgaaaccccgtctctactaaaaatacaaaaaattagccgggcgtggtggtgtgcacctgtagtcccagctactcaggaggctgaggcaggagaatggcgtgaacccgggaggcggagcttgcagtgggccgagatggtgctactgcactcgagcctgggcgacagagcgagactccatctcaaaaacaaaaacaaaaaaaagtatatgttgaataatggtatgatagaagtcactggccacaggaagaataaacttcaaagaagtaagtttattatactcaaaggcttcagagtggattaccgccagtgcgatggctcacacctgtaatcccagcactttgtgaggccgaggcgggcggattacctgaggtcaggagttcaagaccagtgtggccaacatggcaaacccctgtctctacgaaaaaatacaaaaattagccgggcatagtggcacatgcctgtagtgccacctactcaggaggatgaggcaggagaatcgcttgaacctgggaggtggaggttgcagtgagccaagatcatgcctctgcactccagcctcagtgatacagcgacgctctgtctcaaaggaaaaaagaggttgagttaccacatgctatatagggtcatgggcaaagcaccaaattttggtcacgtggcataagacaggagcaaggagcaagactagctagatccttttttgagatttccttaggaaatgccaggcggggtagagtaaatggtttaagattggctagtttgaataatactggtgggccatagggatggtgtctgattctctgggaccttgtcctaggatgatttaggatggataaatagtggcttagtgtgcaagtattagatgagtgtggttggggctgtagacttgggattgataggtatgtgtatgaaagacctgctcctggctgagccctttgctatctctaagagacctatcgctaagaaagacctttgctatctcaaagaacctttgctatcactaagagacagaccctgaatggggtggttcctctttgatcagcaagcatttaaagatgtcaaagcatcataaaatacagcaaataaaaagcatgaataacatatatactctagagagaacattcttacatttactcaaaaatagactgattcgtttcttgtccaactttttttttttttttttttgaagacagagtctcactccgttgccgagacgggagtgcagtggtgcaatctcagctcactgtaacctccaccttccaggttcaagtgattctcctgcctcagcctcccgagtagctgggactacagacatctgccaccgtgcccggctaattttttttttgtatttttagtagagattgggtttcaccatattggccaggctggtctcaaaactcctgacctcatgagccacccgcctcggcctcccaaagtgctgggattacaggtgtgagccacctcaccaagcctgtccaactttctttaatcagctcatctgtcaaaaagagattgactctagatttcccttatttcactacacaaataaagtttccaagtcaccttgactggaagagccagcatttcccgttgtacaactctaattgttactcttacagtccctgtctttacatgtctggtttcttcctcagattcactggtatcattttctgaaaattaaggaacagaagggagctctgtgcctacaaatgactttgatgcacgcaagcatgcacccacacacgtatacacaaacagattcagtatccattgttagaaatgctccaaaatccacaactttaagtgctgacatgaccttcagaagaaatgtttattggggcatttgggattttggattttcatatctgggatgctcaaccagtaaatataaatattcaaaaattcaaaaaatccaaaatccaaaagacttatttccaagcatttcggatgaacaatattcagcctgtgtatgtgtatgtgtgtgtatatacatatatatgtacacttctaattaccagttcatttcttctttataagcttagaaaaatctgttacaaaataaattttggagcagcaatttaaagagctcttgatttccttgttttaaaaactaatcacagtataaagtttctatgcaacagagttctattatatctcttttacatagtaaatgtatttcttgccttaagacttttccaaagtgtagttagttggctatcccccatatgtaggtttaacaaatcacatgattaattttaaaacaaatcatatagttgcaaatattattttgctaggaatcctcacctttaataaatagcttcctgcctagagcttttctgtggatcagatcacaaaatactttgaaagatgcaaagagctatgtcatttcacactagcagttgtcaacatttgtgttaaaccacttttagtgagactatggacacaaatttagacttatcccatcttcattgctgtttataaaaatttcacttactagtgtgaccatcagctattgtctcacagttacattgagaatttccctagactgggaataggtataggttattctattcaatgaaataatgctcataagaatgttttgagtataagtgctatacaaattacctatgttggagaaaaaagacaactcagtatggattaagttctggatttgggattttttttttctttcagattttggaatatttacattatactggttgagcatctcaaatctagagttcaaaatgcttcagtgagcatttcctttgagcatcaggtcagtactgacaaggttttgcattttggaccatttcagatctttgggtttgggacgctcaatgtggagtggttttgctttgttttcaatgttctaaccaacgtatcattaaatcaatttccagggcagagttttaaatactgattgtccaccagaacccacagttgcttctatgtgtcctttgtgaacatgttctgcctatatacttttttttgtagattttccttttcttaggtgacagagactaaagggccttcattataatggatcttggatcttagatgtgcagtttccccccagtatcagctttgccatttccaatctttctattccctcactcttccctctaccctccaaaatatttaagacagataatgaattttaagttataaaatcagtatttcaaatagctttttggattatgattttcaaatttaccttggattatgtaattttgcctcttttttctgcccttccctacctttctctgtattcccccaccaccagttgtcaaatttatattacacaaatattcaatagagaaatcactaataacttatttttgtggcccatcgaattctgttgaatttgagtatataatagctaaaaaaaaaaaaaaaaagcatatttcaggtggtgttttctagccaaatgagtatatgtattttgtatttcatataattctgaagcttattatctggtagtttcagtggtcagtctcaatttttatgtagaaaacttctatactcttccagggcttatcaggattcaaaagttcaatttatgtaacatcatgtagttcaatttttttcttctatctatattagcagtcatatatacattagatatatgttagaatgcttttggttttaacctacaattccttaccaggaaatatttggacagtattataataaagcaacaaagagatagggtttctatgacatttggaaatgtacaatgcaaaaaaaaacccaaaaaccctgctgttcttcattttcctatctgtgaaatgcaggaagaattatcctagatccaaggatgcttttagtattttcaaaggaagacttacgaaaagaattaaaaatggaaattagtgaatgagcaattatacaaataattatcggtgtttattgaagtcccagcgaataagaaagtgaaaaaccatagtaactctttattttataacaaaaatgggattaaattacaaggattcaggtgaccccaacttttgtccattttctatgacttgggaggcttctggacttctctttggcatggtggcactgcctgaaaaaaaaaaaacagggacttcttgttcctcaagtctttttggggcatgttacttagtcgacaacacagaagaaggatactacaataaactgtttttcttcccactcctaggctttgaaaaactagtcagttattgtagtccattctccaaccttaaacaactaaatgatactttaagttagtttgccacccttggcgttagagtctttctgtatggtaagattcaaaaaattcatatggaagtatgttaaggtttatgttaaggttcacatagatactagatattgacgtgttaaaacggagttgttggttgccccacatctgattgttctagtcttctcatcttagtacgtgccagttccatccttctactttcttaggacaaaccccttgacattgtctgtggctcaactctgtatcccaaacccttcatccaacccttcagtaaatatggtcagctacacctttaaaaagtaagtcgaatccagctggttttcactacctcttccactgccatctttattcaagtcactcttatctcttgcctcgattcctgtagtagcctcctaatggccagacccgtcacttcctagactttctataatctagtctcagcacagcaaccaaagtgatactgttcagatgataccagtagcttcctattttattccaagtaaaagcaaaaatgacttcagaaggccctacaggacaattctctacctcttcctttcttattttccgtgtgcttcagtcacactgacctctttgctgttcagacctgccaggcatcattgcatgcagggccttttgcatttactgttacctctacttagaatgttctttcctcagatatttttatggcagacgtttagtgaatcttctttatgtatccaacctaaaattgcacctccccacagtttatttttatcttcttgccctcagcttatttttctccatattacttatccacagttaacaatattttacttattttatgtctttctccaccccctcagttagaatgtaagctctttaagggtaggaatttttctctgctttgttcactgcaatatttcttgtctttaagcagatcctggaatgtagaaatttttcaatatctgttacataaacaagtaaatttgagtatttcgaagagagattcaaggtcatcagtatgttttactaagaaggattggacatcttatttaactatggcaaatggattcttctccacttcaacagttttaacaaaaacagtggaatattcctataatagtacttttcagagagaaaagtttcagctgaggaaaatgaaatatatgcttatctattccaagtctgctaataggtaagtcatattagttgattgatataatttgaaattaacatgaaatttaagtttaaaatgcagtgaatctaatgataacatacaacaatagattttaaagtaatcattggaaaaccttcagaaaaactaggctgttagtcaaattgaagaatatctcctaagggtttctggaaagagacccctgccctaatttcccactaaaaggtccagaaaaattgatgccacctgtagtttggcaacgtgcactaaaaagttcaaggtaccgtctttggcatagcaatttaattgctagaaatcctaacaataaatatcttaagctctaagaatctttatatatataaaatatatggataatcattctttgtcctacatatttaagctctatcatctattttaagtaatttttttttggtatggtatgaggtaaggatcaggttctatttttctcctatatagaaatccagtgccttcatttgttcaaaggacttttcctactgtcttgttacctttgtggaaatcaattgaccatatatgtgtggctctatgtctggaatttctgttatgttctgttgatttatatgtctattgttacatcagtattacactgtcttgactactatagctttatagtaagtcttgaaattaagaaacgtaagtccttgcttgatgacttgggatacagaaaaaaaaatctcctctgagctgttctaacactcaataaagtttgtcttcatcttgctcccccaaaaaaaaaaaaaaaaaaaaaaaaaaagaaagaaaaagaaacgttaagtcctctaactttgttcttttgcagacatttttggctatgttcttttcattttcatgttttgcattttcaatttcagttttcacaaaccaaaaacctgctgggagttttattagaattgcattgaacttataatttggaggaaatggaaatggaaacaatattgagttttccaatccatgaacattatatagttttttggaaagaagtctgctgtcatttttcttctgtgtgtaatgtgtacttttcagcaatttgaatatgatatgcccgtgtgtatgtggatgtgtgtatcatgcttggggttcactgagcctatgtgagttcgtagtttccatcaaatttgcctcacaccctccagttattctctatcccatcattttctttttttttttcttcctatacttgtcaccatctgaaactatcatgattagtatattcacatctgtctctccttgttaaggagtcaaacttgttcaacactgtatccccagcaaccaaacaaggcctgacacagagttggtggtcagtatttgttagctttgtatattattgcctacaacatttaccagtaggataataactcagtcgtcctaatatttgctgtacatcagctacccacagtattctagcattgcttatttcagtgtcagatactgatatgttaaaagggaaaggattaggtagatttttccaaatgcactgttgttctagaaaaggggtaattgttattaaatcaccaccattattactgcctggtgcttcaatgaacctctagcttaagggaaacaaaaacaacttgatgtcaactcttcaaagcaaatggtttctactctgtctacctctccaaatggccacatatcccaagtgttcacaaaatatttattgttattgaggatcctagatgtgagaggggtatagggcagggccaaccttatcaacactttggcctcaaagatgaatggaaccttgccctcggtatttctctgtaactgcagagtttggttgagtagggcagaggagaaagaacagtattagtgtctgtcatttttgactgtatacaatttgctgatcaaatgggagctcagggaatagcctacaatattatcaaaatgttcagccaccatcgtctgcctacatttccacctaaaacagtgctgtttcctatttgctattttttagagggttagtttcttcgtgtgtgtgtgtgtgtgtgtgtgtgtgtgtgtgtgtgtctgtgtgtatatatatattttggctggggtgggggtggagggcatataaatttttgtcaactttccagcgacactgtatttccaacaaggtttaagtaggacatcagtgactggtcaagccctttgaaggctgtctctatgccaagtaagaagattctttttatgtggaatgcagtatcaaatcagcaaagcagcagacttatcaaggaaaaactatacaaagaagttcgggtagaggaaaaggttaatttgaaatctttctgaacttacattataattactgaaggtctttaatattataatagctggcaataattctgatagtggcttttcaatggaatttaaaaaattctacattctacttccactggaaaatgtcatgtcaacgagtttaattgtaaactaaggataagctcaaaagggtgataacagagaaaaaagtaatcaggccactattgagaagaagtacaatgaaagtcgtcaatagtatatcaactcacacactattctacttccccacccttaccatcattcttccctggcactttaattaaaagagaaaggttgaaggaaagagcatatatgtggaactctattctgttgctagactctatgcccctcattgatttgagaacttctttaactgcagtttaaaaaattagacacaatctcttttaaaaccatgaaaaagaaatgaatgcccctaagtataacttacattccacactgaactacaggttttacccaacactgtcaggcaagaaaaaatgtgtaagaatttggaaagaaaaaaaactgccattattcacagatgatttgttgtcaacaaagaaaatccaaatctacagacaaatcatttgaaaaagtgtgtttagcaaaattgtgttatataaggtgataatttaaaaatcatttttatacatcggcaattaataagccatgttttgaaattatttaaaattgtttgaaacttacaaatacaagataaaaataaatgtcacaaaagatggacaaattataaagttttctgagtcattaaggaagatctcaataaatggagagacgtacaatacattttgagaatactactcaataatgtgtagatttcagttttccccaaattgacctaaagattgaatgcaatcaaaatcaaaagtccgtgtaaattagtccagctacagtagagaacattttggagatttctcaaagaactgacagttgaactaccattcaacccagcaatcccattatgggatacatacccaaaggaaaataaattattctaccaaaaaggcccatgcgcctgtatgttcattgcagcactattcacaatagcaaagacatgaaatcaacccaaatgaccattaacagtggattggacaaagaaaatatggtatatatacaccatggaatactatgcagccataaaaaagaacaaaaatcatgtcctgtgcagcaacatggatgcagctggaggctgttatcctaagtgaactaatgcagaaacaaaatcaaatactttatgttctcacttataagtgggagccaaacactgggcacacatggacataaagatgggagcaaaagacactggggactactagaagggatagagcaggaggaatcaagggctaaaaatctacctattgggttctcggctcacccaatgtgggtgatggattccttcataccccagacctcagcaccacacagtatacctttttaacaaatctgcacacgtaccctcaaattctaaaataaaacttgggggaaaaaaataaaaattccaacatagtttttcaaggaattgataaactaattttaaaagtaatagggagtatcaaatgcccccaaatagccaagatactttggaagcaaaagaatgcaacgaaggggcagtggttgccctaccaaatataaaatcttatcataaacctatactgcttaaagatagtatacctaggtccagggatggacaaactgaataatggaaggaactcaagcatacataaggtcttatacttgacaaaggatgttatagagtagtagtgaaaggagaactaatcactacatgccgttcagtgattatccatgtagaaaagaatataattatctcccttgtctctcatcatacataaaaacccaactccatgtgaattaaagacaaatgtgaaagagcaaacttgattaagaaaatacatgagaagattttttactttgaggtaagaaaagatttcttagacacaaaaacaatccataaaagattgataaatttttctatagtaagaatatggacagatcttaaaaacaatgttgaagaaaggagcagtcacagaatattatatatgtatgattctatcttcatattgctcaaaacaactaatacatggataaggaatatataca

SEQ ID NO: 416 - DNA, 71482 bp, Homo sapiens
gatcccagccacacccacatcctctgggtgcagggagtgaagtctgtgttctaactggggtctggggaacccgcctgggaaaagaaagggattctgctcctccagccggatgcaagtggaagaaagaataacacatcacaccagaaggttggaagcagaggatggggagggtgctgggcagtaggcgctgggtggtgggcctctggggggtgcccaatggctctggcagagttgacggggcaggggcagagggcagaaggcagagtcaggagtactcctgcctctgctgggtctaagcccaggcacatcactgagcacttgaccagcctgacctcaccatggccttgtgaggtgggtatggtgtacaccctccttttagacgtttatagatatttagaggaaaatgaggccctgacagggcatcacgtgcccaaggtcactcagagcaaggatttgaacccaggtccctgactccaaagccagtgcttggaacaacgttgggggtcttcttccccactcctcacctaccttctaaacaggcactgtggggcagggtggggcttagatgagagaaaattctggaatcctgagcaactttgcctggggggctccgcggtggagggcagcagcacccaaggaccagctagccactctctctgcccctccagcctacaggtgggaggataaggctcagggccgacaagtcctgtggcctcatgcagcagagctgagccgggacgaaccctgtcccctggagaagcaggggacaccctggctggctgtgaccactttggccaccctgggcttcctgggttggtcaaggggtctctggtgtaaaaaggggactccctgtcaaagactgagtgagatggagctgcccggcaatgtgggcctctcccagtgactgtccctgttctcttgggcaacggaagcccgaggatacaatgatgtgtcccttccttggccacactggtacccacagggattattgtgtttctacctgtggagtcagctctcaggcgcctccagcactgtgggagaaacccctgggaccccagtgcttcttcccaacccttgggactggcacccgtctcttgttgagagaaagcacagtcatgtctgtcattcagaaaatcacatccctggatggccaagccacgtcagaagggatgggctgtggggatccaagcgtgttctacctctgggctgcacccgccatccctctgcttcggtttgaatgcttgtccccgccaaaactcatgctgaaatttaatccccaatgtggcagtattgagaggtgctgcctttaagaggtgactggatcatgaggccctgtccccgtagatggattcatccattcatggattcatgggttagtgggttatcatgggagggtaactggtggctttgtaagaggaagagagacttgagctagcatgtgagcaggctcagcatcctcaccacgtgatgcccagtaccgtctcgggacaccagagtccccaccagcaagaaggccttcacctgctgcagcctctctgaggcaggaggagagggaattagggaagccaagggttggggcataagcaaaggaacagcaggtacagcccgttcacataagccagagaacagcaggtgcagcccgttctcataagccagagaacagcaggtgcagccagttctaggcaggattggggagcacacaggccacatcctcactgctgtgataacaagtcaggagcttccacttcaacctctgattgaccctgggccaatcctccacttcagcctctgattggtcccaggctaatccttcatagggtgtaaccaattggaggcctctaaagggcatctggggtgttctttataaaaaccctgagaagcattgcaattgggaggtccttgagccgtttgcttgggcccgctcccaccctgtgggttgcacgttcgcttcaatcaatctgtgcctttggtaagctgttttcttgttgctttgtctttttttttttttttttttttggtggagtttcactctcattgcccaggctagagtgcaatggcacagtctgggctcactccaaactctgcctcctgggttcaagcgattctcctgcctctgcctcccaagtagctgggattacaggtaccggccaccacgcccagctaatttttttgtatttttagtagagacggggtttcaccatgttggcaaggctggtctcaggtacctcggcctcccaaagtgctgggattacgggcgtgagccactgcgactggcctgttttgtctgtcattgtttcattcttttgttactttgtgagttttgttcacttctttgttcaatacaccaagaacctggacaactcagtcaggaccttccatcctataacacctcaacctcggacttctcagccttcataactgtgagaaattccttttctttataaattacccggttttaggtattctgttataagcaacagaaaatctactttaaaagcctccatggcacaggtgagccctgcagtgtgtctgggtgatgcctgcagctgtcgagagggaggagacagctcagagtcacctgcaatctggctcttgccattacagactccagatgatgaagttgaaaatactgacaggctggaggccatctggggtcctgctggctcccagttccaggaagcctggaagagcactggggtgagctcgggccagcgcatgtttactgtcacaggggacatgtttcagcactttcattgtaaggctgtggccttctgtgcttgtggatcctcagtctcagtggccttcctcttccccccaccccaactcctgtgttgcgtgtttaacacacctacgcccaaccgggacataactaaatcctagactgtggacaaagaatacagtcacctcagggggctgcgagctctaaaggctcagggcccagctacccctttaggatgggtcagtaacaacacgactgactctgtaaattggtgatcacctgagactggacctcagcaccacacggacctgtgcttcaccttggccatcgggggagagtatggaggtcttttgctggcaggaatcagcacccttatcctggcaatcagcactcactggccattcatgaggctccagcaggacgagtggccacagtgtgcagggcacaggggatggggctttccaaggtgtttctggatgacatcaatcacacaaggagttgtaggaatgctggcatcctggttcacgggtagacgccagaggatgccaagggtgctgggtagaaagcagaggatgccaagggtgctgggtggtgggccccttgggggtgcccaatggctctggcagagttgttggggcagagtcgggaccacccccacctcttccgggtccaagcccaggcactgcactgagcacttgatgagcctgacctcaccatggccttgtgacgtgggcactgtgggcaggaatgcttatggaatgaggcccactgtaaccctaacacagcatcacaagtctttccccagagagaaaacgcacaggcaatggaaatctatggttaggaacaaagattcccgtctaagaaaaagggtggaccacgggcctctagaagggactgagggggcaaagtcctgcccgtgcactggctaacactcttcctttagcttttcccccccactttccatattgtacattttatctgtttataatttttcttagtgctgactaaattccagagttagaccttgaaatccacaagttcctaattggtggtcaacagaaacctcagcaagacaagcagaaaatgctcctcttcccctaaagctgtagaaaggcagccaccaacctgggctaggaaatggtccttacagatactattttttttttaactgtggtaaaacctatataacaaaactgatgctaatttaactgtttttaagagtagaattgagtgacattagttcgattcactgttgggcaaccatcaccactctctatttccataattttttcatcaccccaaatagaagctctatatccattagctaactcctcatttcccctccctctaacccctggtagcctctatcctttctgtctccatgaatttgccttttggagatatttctcataagtggaattgtaatgttttcaaagttcatccatgttgtagcatgtgtgggcataccataccttttttttttttttttaagaagcggagtttccctcttgttgcccaggctggagtgtagtggcacaatcccggctcaatgcaacctctgcctcccgggtttaagcaatactcctgcctcggcctcccaagtagctgggattacaggtgctcatcaccatacccggctaattttgtatttttagtagagatggggttttaccatgttggtcagactggtcttgaacttctgacctcaagtgatccacccaccttggcctcccaaagtgctgggattacaggcatgagccattgcacctggcctttttatgactgaataatattccactgtatgttgctggcatgcaatggtgcattctcttataaagcattatcttctcatcctttttatttgtgtaaagttggtaggaatgttcccactttcattccaaattttagtaatttgagtcttgtctcttctttgttcatctaaagtattgtcaattttgttctttagaaataaccagtttttggttttgctgattttctctatttttctattctctattttgtttatctctgctgtaatctttattatttccttcattctgctagctttgggtttagttcgctctttttctaattcctaaatgtgtgcggataaattattgatttgagatctttctgcttttttaatgtagtcgtttacagctataaatttcccccaagcactgctttcaatttcaccgcatgctgtaagttttggtatgttgtgtttttgttttgtctcaaggtgtcttctaatttcccttgtgacttccttttagacccattggttgtttaagagtgtgttaagcctgggcgcggtggctcacgcctgtaatcccagcactttgggaggctgaggcaggtggatcatgaggtcaggagttcaagaccaggctggccaacatggtgaaaccccatctctattaaaaaatatataaaaattaaccagctgtggtggtgcacacctgtaatcctagctactcaggaggctgagacaggagaattgcttgaaccttggaggtggaggttgcagtgagctgagatcgtgccacggcaccccagcctgggcgatggagcaagactccgtctggagtcggggaggggaagagtgttaagatccttttgtagttgatgaacaatgatgattgggtgttcatgcacatgcgtgagatgtgtcaccctcaaacccttacgtcggcacgttacccatctgacgtgaaaaagaagagagtgcgttaacttccacatattcatgagtgttccagtttttcttctgctatggatttataattttatcctattgtaattggaatgatactttgtataatttcgttttaaaaatttattgctgggtgcagtggctcatgcctgtaatcccagcactttgggaagccgaggcagggagatcacctgaggtcaggagttcaagaccaacctgcttaacatggtaaaactccatctctactaaaaatacaaaaattagccgggtgtggtggcgggtgctgtaatcccacctactcgggaggctgaggcaggagaagcacttgaacctgggaggtggaagttgcagtgagccaagactgcaccattgcactccagcctgggcaacaagagcaaaactccgtcttaaaaaaaaaaattaagacttactttatggcctaacatatggtctatcctggaaaatgttccatgtacacttgacaataatgtgtagtctgttgttgctggtttgtgtgttgtgtatatgtctgctcagtctaattggtttatagagttgctcaaatcctctttccttatagatcttctgtttggttgttcttatccattattggaaatgaggtattgaaatctccaattgtgtatttctcatttaattatatcaatttttgcttcatacattttgggtgttttaagtgtgtgtatggatacaattgttgtatcttgagaagttgcagcttttgtcagtgtatactgaccttgtcttgttacggttttgacttaaaatctattttgtctgataatactatagccattgttaaaatatactattttcatggaataactttttccaacattttactttcaacttttttgtatctttgtattcaaaatttgtctcagccgggtgcagtagctcacgcctgtaatcctagcactttgggaggccaaagtgggtgggtcacttgaggtcaggagttcaaaaccagcctggccaatatggtaaaaccctgtctctaccaaaaacacacaaaaaaattagccaggtgtggtggtagacacctgtaatcccagctactcaggaggctgaggcaggacaattgcttgaacctgggaggtggagtttgcagtgagctgagattgcatcactgcactccagcctaagcgacagagtgagattccacctcaaaataaaataaaatttgtctctacaggctgggcatagtggctcacacctgtaatcctagcactttgggaggccaaggcggacaggtcacctgaggtcaggagtttgagaccagcctggccaacgtggcaaaaccctgtctctactaaaaatacaaaattagctgggtgtgatagtgggtgcctataatcccagctacttgggagacttgcccaggggtcaagtggcagtgagccaagatcgtgccacttcactccagcgtgggtgaagagtgaaacaccatctcaaaaaaaaaaaagtctatacagcatatagatagacaaagttctaaaaaaatccattctgcccatctttttttttttttttttttttttttttttcctgagacagggtcttgctcttgctctgttgtccaggctggagtgcattggcaggatcacagctcactacagccttgacctcccgggcttaagcgatcttcccacatcagcctcttgagagctgggaccacagatgcacatcaccatgcctggctaattttaaaatttttctgtagagatagaatctcaccgtgttgcccatgctggtctcaaactccggggctcaagccatctccaacctcagcctcccaaagtgctgggattacaggtgtaagccactgcatctggcccaatctctgctttttaattggagaacttaacccatttgtatttatagtaattaatgagaaaacctttacttctgccatttagctgtttgttttctgtatgtcttatgattttcattcctcaattcctccactactgctttttacggatttacttttgtacaattttgatcctttctttgctttcctatatactttttagttattttcttactggttacttttggtattacaagtaacatcttaaacatataacaatctagtttcaataataccaattgaatttaagtagtatacactgctattacacatcttccctctgtcagtcacagattatatctttatacattgtttccattaatgtggatttatagctttatgaattttacctttaaatcataagaaaaaaggatgagttacacaaatccaaagtgaaataacactggctttgctaactacctgttagttatctctaccagtgttctttagtttttcatatggcttcaagttactgtctagtgtttattttagctggaaggactccctttaccatttattgtagggcaggtctactaataaaactcccttaacttttatctgagaatgtcttaatttctccttcatccttaaaggatgttttgcttcttctttcagcactttattttgagaatattttttgagacggagtcttgctctgtcgctcaggctggagggcagtggtgcgatcttggctcactgcaacctccgtctcccgggttcaagcgattctcctggctcagcctccaaatagttgggactataggtatgtgccaccatgcctggctaatttttgtatttttagtagagacaaggtttcaccatgttggccagtttggtctcgaactcctgacttcagatgatctgtccaccacggcctcccaaagtgctgggattacaggtgtgagccaccatgctcagccttctttcagcactttaaatatgtcatcctattaccttctagactccatggtttctgatgagaaatcagctgttaatcctgaggatctcttgtatatgatgaatctcttcttgctgctttcaagattttctgtcttttgacaatttgactaataaatttgggtatggatctgagtttatcctgtttgaaactcattgagcttcttggatatggagatttatgtctttcatcaaatttgggacgttctggaccattattcaaataatctctgccttttctgaactctcattaaatgtatgttggtacatttaatggtgtcctacaagaacctctagttctgttcatttttcttcctttttctttctgttccctggacagaataatctctattgccttatcttccagtacactgattctttcttctgcctgcttaaatctgctgttgaatctctctagtacatttttcttctcagttatacttttcagctccggagcttctggttggtttttataatttctatccctttattgctaatcacccatttgctcatacattattttccatggtttcctttagctcatcaagcatatttaggacaagtgatttaatgtctctgactagtaattttaatgtctgagcttcctcaaggatagcttctgttaaatcctcttttcccctgtgaatgagccatatttttgtttctttgtaattttttgagaactgaacattgagtattataatgcagtgactctggaaatcagattgtctccctcctcaggaattgcttttttgcttattgaaggatgcagtcttctgtgtccatagtgacttttccaggcttatattcgtatttttgccaggcttatatttgtattccttgttgtgtatagtcacgaagtttctgttctgttgtctcttggtcagcctgtgacttgatggagatcctgttaactgttggagttcagcagcatctcccttcaccaagtgttcccctggtgactatgtccgaccaggttccagagtcccaaaacagtttattctgatagttttctttcttccagcttaatcgttgtttctgtgcaaaaactgaaccctggggcctcctactctgccatcttttgtcacaaatgttactttattattattattttttgagacagagtctcacactgttgcccgggctggaggacagtggcgtgatctcagctccctgcaacctccgcctcccaggttcaagcgattctcttgcgtcagcctcccgaatagctgggattaaaggtgcctggcaccatgcctggctaattttttttatttttagtagagatggggtttcaccatgttagccaggatggtctcgatctcctgacctcatgatccacctgccttggcctcccaaagtgctgggattacaggcatgagccaccacgcctggccacaaatgttacttttaaagacagctaaatttcagaaattcttgctatgccttgtgaaagtacctccaaactctagtcccaggagttctgagggctgtctcagcacatttcccagtttaatggtgccaaaaggaacatctgctgtatgaaaggtaaacttttgtgtttccttcagtgtgctgagaagagtggctggcttttcctgtgcataaaataactggataaccctgcaagggtccttacttaaacacggaatgtgagagtctctatctcattttaattaagacaggtaatgaaagaacaaaactgtaatgaccagggtatagtagaaacaggattttaatataatattcaagtctagcatttgctatttacaacaaataaatattgcccctccccaatcagtaaacaaacattttttttttctttttgctttttatacaaatattcaatcaccccacccccaccccaaatcctccttcctcactaacccccgtcttgcatggtctcgtaaagcccaggacgcagtggtgaatggcacttgcagtggcatgagattcaacatcgatgggactcagctgggactgtcctcactcaccgggtgcagagtctggtccatgaagagggtttctctctctgctcccaggggagggctggggtaagcggtgggtgagactccctcactctcagttggccctgatgatggaatctttggtgcagcctgagaaaggctagagtggtgggaggggccgggacccctgcgaaggtcacaggccagtgcctgtgggcatgagagaactgcagtggtcacagtgggtgctctggggtgcccatgggcacaggtggcagtgacccacacctgggaaggtgtcagggaagtgtacagaggtggcgcccgggggcaggcagggcaccatgccatgcccgttggcactgctccttggcaaaagtcagctagtcctctggttccagagagcagaaggcacctaaggcagcgagtggtccacgggaggccaggtcagcctgaccaatggcaggcgtcaatcccagcagcgggagaggttcaggatgaaactggagtctggggtaccctgggctggcaggtgggaggaaggcgcccagctggcctgggccactctggtccataagtgcttggctaccagccagccagaccctgggaggatgccctcagaagatgcccttggcaatcttgagtcctttctgcttcatgcgagggagggtggagctggctccgtgcttgaccttcactcccttggtgaaggtccgcttcttgaggacaaagtcatagttggcggtagagttcatggcatagaagacgttggcgttttcagggatcttcagctctggtggggaggggcagaggggtgatcagggatgctcctgggggccctgcaggatacccctaccgcttgagagcccatacaaggactgtcttgagccacagacctcagatcccctccaatacagctccagaactccaaggacccctctcaatgactcctgcctgaggacagactctgctgaggtcctcacaaaacctgatgactcttgtttaaacagggactgactccagaaccccccggcttggcctgagctggcagagggtcaccccgtcctgcccatactgcagtgctggctgcccacctggaacaggctttctagaatccaggtcacctcccagaatcctgccctactcaggacaagggatccaaggaccaggaaaggacaggcctgccccagggctctggcgcccgttccagggaggcctgtactccttgaaccctggcacccggcaagcacttccttttggctccatttcccaccatctcctctggcccacagcctgctataaaccagagctgggctcgatttgtgctcctgccgacatcgtgtggcttttcgtcatctttaacctctctaggcctcagtcttccttttctgtaagatgggggtcccgcctaccctgcccacctaaccgaaatggtgcaagaagctgccagaggatttagactgtaacttctagggatcacaggagtcattgcttactgtctgggctaatggtgggaggtggtgttcagctcactggaaagaaaacagcgatgatagtatttatagttaacttttatggtgcacatagatgctttatatatacatgcatatatatacacacacatatacatgcatatatatacacacacatatacatgcatatatatacacatatatacatacatatacacatatatacatacatatagatttttacatatatgatgaacacactggctactttcatttccatttgggggatgagaagacaagcacagagggcttaaggagcttgcccagcgtctccaggcccaggataccccactctgagcctgcactggttcttgacactttcccagtttctagaatactgagttggcctcctagtagcctgttctgcttttagaatcacacactcatggattttaacacttgacactttggtccacagctgtcaccattctttgtagagcacatgttttcttgtcttagccagaaagagtcccttccagtgggccacgtggctaacctgtcccagtgaaaaatgccttttctctttgctcctcactgatgtgagctttgaactgcctgttcacgcctagggaagggcacacactggggaggtccagtggttgctggggacagcaagcagacaatgggggcagccagggctgccctgtccacagtgtctacccacactctgctggtgaattttctggggccaaaggcttccaacctggggctggggagtggtgtggacctgccccctctgccatcgccctctggtcttctgacttactccggtcatctgagagaatctgcagcagctcatagtcctccggctcctcctcctccaggttgtgtttgtccatggccttgcggattacagccggagccttatcttggctggtcacctgcatcgcggcgggggatggaccatcagggaaaagaccctggagcggctcccccagagtgcagtggccaaggaccctctggagtcccctcagcaccaagcacaggcactcacagcctctggccaggtgctgggtccggagagggccttgtcacattctcctactccccaagtgaggcctccgtccttctgttccccatgtgaggcctccatggaatgaggaggggtctgtcccagcagtgcctaccctgcttctcctgtaagagactgttccctcctcccacacttccttgagaagcacttgcccctccaggataacagcatcactgagcctggggaacagacagtccctagtccaagccctggaggtaagaaaggaggggccggccaggatgctcagtgtggtcagcataggccaggcccctgctaccttgaccctgagggccagagcacaggcggaactcggacatagggccacaggtgactgcttaatgacaaccatgctagctcctggcaatgaggggtcaggagcgtgtgtgaataatggggcacctgacccagggctggggtacagagggtgggggttacaaatggttcatctgtcgcaggacacctggaggatgaagaaagagcccccaggcaaacccattctgtgagcaattcccatctgctgtctccaaatcctgtctagactctgaccctgctggccccttccagggctcccagcctggttgccacagcggcctcctaaccaacacccctgcggctctggtaccagcccacaccagacagagaagccagccatcattgctcctgtcttcctccccgagaaagtcgaggtcctggcagggctcagggcctatgtggccaggccctggatacttccctgacctcacctcccctacagcaccgccccttcagctcctgggggctttgcacggctgctcctttcctccccctctgccctcaggccagccttgtccctgatcactaccttcttcatttctgtacctggctgacatctgtccttccccgccaactacaaggtagaccccgggagggcagggatggtgcactgtgttcagggtgcatttgccgccagtggagggaggcacccaggccacccccgccggcttaccaggatgctcttgtacatgttgccattgtccacgtccaggctgacgcggatgatacagcagtcgcccacctgctggttgtagagcggcagcgcggagctggagttgcagagccctgagacagagcgcttgtgggtgcgtgtggcagccacgggcgtggtggaggctgaggaggacgaggtgctgctggaggctgagctgatgccggaggtctccggggatgactgtgaggctgattcccagaactgagggagacggtaagatcagcagatcccactgccctgtgggggcaccccaggccagctgccagatggggaaccttctagaagctgtgttcaggatccagggcttcctggccccatgcatggatttggagtggggagatgggaaaggatattggggagaagggcaggcagtcaccttcttttcctggccatcaggagactccgggacgaagctgatgttgatctcctccacgtcggagctagaggagccggccgagtgcacgctgagcgcgtcagcgatgtccccgctgctgaggtaggggccacacctgagctggtcacaggacttggagtgggagctgccactggtactgagctcagtgctgggggcctggcggctgggtgaagagttggcttagttaagggggctccccaaggacacatcccaaccccacagcccctgcaccctgcgcccaaggactgtgcaaagtgctgggacagttgccagtactccattcaccacagccatctgggagagcatttagtatcaccccatttcacagaggaggaaactgaggcccaaaaaggtgaggggactcatcccagtctcagggccagtcagcagcagggtaggattccagggccagcctccctgactccctgagcccaggctcagccctgaagcttctgagccccaaggcagctgcccctaccacccttggccaggcccttactcgctccagcgcttgacaatggctgtgttcttcttggtcctgagggtgttgctggctgactcggatgggggctccagctcgcacgacaggttgtagctatgagcagaggggcagtggtgtgacaaccaggggccatgctccggccttcccccagcacctgcccagaagctggagtcggggtgccccggccatcctcaggcaacaggggctgaggctgaccatgggtcatagctgctggccctctggagctggccccctaggacagcctgcccccactgtccccatttgctgccccggcctcacctctcagtctcgctgagccgctccacggcccggaaccaggccccaaattgctcatctggcgcgatgctgtagttgttgcaggccgactgcagcagcttgatctgggcgatcacctcgaactcctggggccagagggaagcacagggcggtgacaaggccccccgggcagcacaggggccagtctctgggtctttgttcttggggtcccttcctcccctctactcccatccaggccttcctgttctcaaagttgggctcagccactccccaggaggtggtcctggattataacctcctaccctcaccctccagtgggaggggacccccttctctctgtgtccaaatgtcccatgtcccatgaatctaaggagagggtaggagttgaaatgtcctaccctggtgggtctgttttccacccctccccaagtcagggctgcctgcagctgcttaccttcctcctcttctcaaagttgatgagtctgccctggaaggtggacacccaatggccgtcagaaagtgaccccttgaccattacagtctccccacctcatgctgcactatcaagagtgcccaccagggggcagggcacgcacacccctggattgaagccggtgctgggcaccagggcaaggggacatgcgggcagaggcttggggacttcttgtccagcactctcggaggacaatggactgaggccttgggtgagaaggccctgctcagccaccacgtgccgcctgaccgctgagggcctggcttccctctgtgctcagggtcactgcctgagggatgggctgtgtcccactcagccaaaccctgctgcagctctgtgtttgggcagccctggggtgtcaccagcagggcactgagctgtttactcattgctgggacaggtgtggcagcccagcccccagggctcagggaaggtctctcctcccgggccctactccagccccgcccggcacactcacatacagatagtccttcatggcagtgtccagcatcaccaggtcggtgaggaacgtgcccaggtagggaacggtgccctggatgatgccctgtgacattggggtaggaggatgagcaaggcccctcccctgaaggctttctcagcccccagccccaactggtctcacttggaacagctgggggacctctgggggcctcctggggcccactgtctccctggaccccagactccctctagccatctccctggctggcatctgggaaatgccaggttcccaagtcgtgtggcccctggccctccccagccccacacccgcctgagccggctctgccaggcctgtcctttcgtggctgcagctggtcttcccagataccagctgatccaggtgtggctctgctagggtccagaggaggctacctctaatggggcccataggcaccgtggctagagaggaaagggccctcctccctacccccaggccagccccctgcccctccgcggccttgggcactctcaccgtctccttcggccgtttctgggctctcttggggttcatctccagggtggcaaacttggaggtgccctcctgccagggtagaggacagggtcagcaaggccctatcccctcagccctcaggcaccctgacctggggtgctgccagtgtggtcgggttccagggctgaccctgtatcaatactcactagtgtggggtcctgggccggtggcctggccttcctgagcctgcctccccctctggaaagtgcggatgagaactccgcctgctgcatggtgcggtggctcacgcctgtaatcccagcattttggaaggccaaggcaggtggatcacttgaggtcaggagtttaagaccagcctggccaacacagtgaaaccccatctctactaaaaaatacaaaaattacctgggttggtggtgcacacctataatcccagctacttgggaagctgaggcaggagaatcccttgaacccaggaggtggggattgcagtgagccgagatcacgccattgcactccagcctgggagacagagcgagactccttctctaaacaaataaaaaaactccacctgcctcgcagggcctcagagactctgcgctacagtcctgttatggctgcacactcctttctcccttgaaccttccataaggtcagcaccccagggctggcattcctccattttctagatgaggaaactatggccctgagatgggcagtgacttgccctgggccccccagggactcagaacaggctcttctgtcctagccagaggctctgccccatctgcctttacccgtttggtcactgatcagggtaccgtcctctgggcttctcgtgcatgccagggcccccagtggagctgtgccacggagggagagggacaggtgtcccaggagccccctgcgatgctcccctgtagggaactctgtgtgtgtccacgcaggaggggggccctagatgccatttcactgaccgggtatgccaggggcaccaggcagtgacacttgactccctctgaggcctcgtgaatccattagtcactgaaagttctcctcagtcatctggggtatccgccacagctaatggggtgccatgggaagaattctacagggttctctggtcagtgtctcttctcggggcagggtagggaagccacatggggcctccaaatctgcctcccaggtctggccacctggcccctggcatcccctgcagctcctgtccctggggtaggcaggctgccctctccttgggtgtgtagagcagacagaggtagcgtcaggagcctggcctcccggggacagactgggccggtgtgggggcaggagccgcatccccttcccacccagcaggagggaccggcgaggaagccagaggcctgctggtcctgatgcccatctactcctcctggaacctccactgctacccttactgtgtccaattaactggggccctgtccctcaaacacccaggggccaaacagatccctcttcccccttcacgcacacgggaaaggaactttcccagcaagaagcgaatgccaccgcccgccgccccagcccccgccccagcccccgccccagcccccgccccagccccagcccccgccccagcccccgccccagcccccgccccagcccccgccccagcctgccgccactccaccttgatgagcagctcccggctcaatgagtagttgttctcatctgagaagatctctgacagcttctgaaagatccggaaactgtccctgtcagaagggcaaagaaggaaagagaaagctgggaatggtagggaggggtgtgagtgcaaatccgttttattttagagctgaaagaccccagactgcctgaacgcagcacacagggtaccccagagcactaacgctctgcaggtctggggagggggccttcatgttggtgcaacaggaccccattcccgtttccactgagcagctatttccaaaggggtttttttctttttttggagacagtttcagtcacccaggctggagtgcagtggccagatgtcgactcattgcaacctctacctcctgggtccaagaaattctcctgcctcagcctcccaagtagctgggattacaggcgttagccattgcgcctggcacaaaggttttgatttcaattggatgagggttctgtggctacaacacgaatacctgaaaatctctgatgtggctcaacccaccatctgacagcttaggaagccgagctctgaggcagagctgctgccaactcaggtcagtgaagggtccctgccctcagggtttgtggcctcccatgggctcactaagggggtgatgccagccctgtgggaggtccctggtgcaccaggagctcctacagaggcatgcccacctggaaacgtcttcccacgtcttcttcagacggtggatggagttgctctgcagggcagagaggatggcatacagtgacgagaagttcttgaggatccggcactcctggggcgggaagagcaggaggcatgaggtggggctggagctcccagcttgcctggcctcagtcccccttggccaagcctcccctcctaatgagacagacacccagggagtccccagagggcacgcctgcgacccgggggtgacaggaggattttagctcaacccaaggaaagagtgtaaggaagacgtgagcatccaggcagtgggctgggagagtcaaggccagcatgcccctgggaagggtagactggggcctgtacagggccttggactgcagaccacaacctgagaacagatgaagccaaagtgggggcccaggcccctcctctggcataccctggccacctcgatccagtgctccaccaccctggccctgtctggggctttcgtgcttcggttcccgaggcaggtggtgatgacacagttggccacactgttgaactgggtgacagtggcgcggatggtgggcgccaggtgctccttgcccttcttgtcccgctgggaccagatggagcccaggcagtggtagggcaccaccttcttgaacagttcctggggaggaggctaaatgtcacctggtcctgccccagcagtctgggctggtgctggggaagctgaggatgcagcttgagccttgtggggatctctgggttttatcccgtgtccatgcagggtgcccagcacacaagtgacccgggacagaacgctggtgggaagaagaggagcaccgcctcgcgcagcctcaccaagccccagctccaacaggcggctcacgcctgcccaccccccatccccccgcctcagtctgctccccatccagacgcacatctgctgtgggcgctacaactaagggctttgtccagtgtctgccataggctccaggacacaccaagtgcctaatgagtgctgaggctggtgagcctcctgaacagatgggggtgacccatggatgcaccttggtgagcaccctccgctcccacaggccaggcctgctgagcttcctgtctgttccatctagaatctgcacagtcactctggaggataggggtgacctcatctctactgtccagaggtaaactgaggacttggggttaaggaacgacctggttacttggtgtgtagcagcagagctgggatttgaccagaacatcagctctggatcagcaaatggtaggtctgggacagcagatgctgccagaaggcaggcccacccctgccctgccaagctgagctgctcaccgcatccatcagtgtaaactgctctgccaccagatctggagggaacaccaagaggtgaggcttctcctcactcagcccgttctctgcaaccacaggtgaaggccaggaaggctgtaatgatggaactggtgctggagctggctccagctctagagtttgtgagggagctggatcctgttctggagctggctctagttccagagctggcgctggagccgattctagtcccacagctggctctggagcctgctggagctccggagctggtgctggagctacttctagctctgaacctggagctggtgttggagctggctctggctccggggctggagccggcactgggctgggtgctcgagctggtgttagagctagctcgagctctggagttggttttagagctggcactggtgacagagctgcaagaggagaaaagttcaacaacatgccagcctttcctgtgcctttccaaagacacagaacagccccggcttccagagaagcctctctccccgaacccacaaaacgtgtaccaggccactctcctgcctgtggtccctgcctgtgtggtctgaggctcatctgggcccctgacccagcaccagaccctggagcctcctcttcgtgtggcccagcaccgacccctcctcattcaccctctggcacccaccccagtcctcctcaccctcaggctctgcctcaatgggttccgagtgctccagctgggccaggagaaggtgggcacggcgctccaggtctgagcctggcatgttgagctgcacgtaggccaccagctgcttgaggcagggaaagtccggaggttgacagaaatcctccgagtactggtccagccaggtgcccaggatggaggagatggcactggggacaggtgggtggcagcagagtcagaggcctgggctcccctgagccaggctgggctcctgagccggcccctgtccatctgaaggccacctgccccggcccaagcccccttggctgtccagctaaaagaaccaaggaggcccctggtcagtggcgaacacctctcccctcctccaaggaagccccgcccacagctctgcatgtctcccagcaccccctcctcgctggaatgtaaactccatgagggatcggtcctcctgccgggcatctgcaggtccctggcggctcctcaacttgtagctcagtgctggtgagctgccttactctctcagagctgtgtgtgggtctcatcttcccactaatcctgttctcccagagggtggggtgcagcctgcccactgagcactcactattgaggggtgaggcaatgtgagagcagaggctcaccccacctcttgccaggggcccctagatcagggcccactgagccaaggccagctgggatgaggctatggtgggatgagttcccgccgggggctgccccgagccccagccaccccaggacccctccacagctctcggtcgtctttcttcctgcaggcgaagcccccagaccccagccctctagcaggaaccacaagaggtgtgggagccagggttctgcccagccagccccggctccggccccagccccatgtactctcccactgttcggtggggacagggtcccttcctcttggctcaaagctcactcactttttaagttggtcctggggtccaccatcctcgtcggaataggggaggatgcagccgtatctagaggaggccgtgagggcgtcacatctaccgtacctgcttatgacgtctagtgttactgtctgactctccgactagaacggaggcccaggagggcagggatttttttttttgctttttttcatcaaattatattaaatgcctagaaaagggccagcacacagtaggtgcttcatatatatttgttcaatgaataagtcccaaccagctccttcccagctatctgagcgccccttgggtccctccaacagcccccagatagaatccggaatctccttgacaagtgggaaaactgcttcgcccaaggccacatacaagagaggcttggggcagagagcttccccatgggggacaggaaaatcataaaaacgagcaccacagccccgcagcccattccctacagggccaggcgttgagggagcactttccacgcctcatcccgcccaggcatggtgacaaccccatgaggtcctcttagcactccagtttctctttcatatgagcaaagcgaggctcagagaggtgaatcagcattgccaagacccgcagccaggtgggggtgggggcgagggcccctgtgcaccctgtgcagtggagggctcatgctcaccttttgaacagcaggtccaggacctgttgggtggtggtgaaggctctataggtacacaggaagatggtgacgtaggagaggtcgctgccctggaaggctggcaccaggtgctccaccagcttctccagcgtgccagccttcacggtccgcaccttgcaagtctcataaaggttcagggccgactcattctcatactggggtgggacagaggagggacagacagtcagtggcagcacacgaatctcctggagctcagatggaaccccgagccctcagcagcttgtggcaagaggcaggactgagtatctctagcagaaaaaggttatcagctttaaaagtagaatttcaggccaggtgtggtggctcacatcagtcatcccggcactttgggaggccaaggtgggagcatcacttgaagccaagagtttgagaccagcctgggcaacaaagtgaaatcccccagctctacaaaaaaattgtttacaaaacttaaaaattagccagggccaggcatagtagcttacgcctgtcatcccagcattttgggaggctgaggtgggcaaattgcttgagcccaggagtttgagaccagcctgggcaacatggcaaaaccccatctctacaaaaaatacaaaattagccaggtgtggtggtcccagctacctggggaactgaggtgagaagatcgcttgagcccaggaggtcaaggctgctgtgagctatgatcatacctctgcatggcagcctgggtgacagagtgagaccctgtctctaaaagagtgaaaaaatttttaaagtagaatttgaggtgcgggaatgatttaaatactgacaccttcaggtccgttgttagctgagtaatggtagctgccctgtgggaagagcgtcatctgagagctctaacaaaatatccccattctagagatgaggaaacagaggcttatccaggggctgggagggactggcccgttaggacgcacagcatcttccccgtggcactgttttgttttgttttgagacagtcacccaggctagagtgcagtggtgtgatctcggctcactgcaacctcagcctcctgggctgaagcaattctcatgtctcagcctcccaagtagttgggattacaggcacacaccaccatgcttggctaatttttgtatttttagtagagatggggtttcaccatgtgggccaggctggtctcaaactcctgaccttaggcaatcctcctgccttggcctcccaaaatgctgggattacaggcatgagccactgcgcctggctcctgcagcactgttgaagtgtcctcagaggactcacagtggccccacagtcatgaggagctgaactggggcagtggctccagcctcccttctggaatattatgcagctgagtcaggccccggctctcaacctggaggaaccccagggatgtgttctgggagatggcaacttgcagagacctaacagcctgaagcccttttgtccttgggtgaagacagccccactactccagatggtgtgcacatctgggagaaggcatggaggatggtgaggctgatggctgcacacccggggaagggaggtcaaacatgaaaacccgattaagcctgggctggacagtgggggtcgggaagggagtgaaggccgtttcctttgggatcagaactgggggccctcaagtgaaaaagtcctgggagggatccccagctgcgtctcccagtggagaccccgagcgcactcaccccgagccagcgctgccccttgttgcctccgtggtgcagctgcaccttgcgcagggagatggagtagatgactccgttgatcagctcctcaccgatctcctgcgtggagctctgtgaagacaacgcccggcagccgggcgcggggacgtcaagggcctgcctggccaccgtgcaggggatgcacctgtgtaacctgtttcccagatagggcacagactggcggctgcacagacctacagcctggggtggaatgagatcacagctcgagagccactgtcccggcactccacttccccaacccggccagccacgacctgggacgtgattatgatgagtccaccaggcttccaatcccctagtaactggcttctgctcctgcccaggacagacccaccctcaagccatccccttccacacaggggactgttattcagccattgcacagatgggtaaatggaggctgagagaggaacaactggtccaaggtcatgctgcctcgggtaagtggtgaggcagggaccccagggctctgacacggctgactgcatccaggcggctatgccccaagagaaggtccccctacctccccagggccagaggcccatgggcatcctcacactcacccctcctctacccagcctggggggccctggctgacctagcaggaacgcacagctcctctgggcccagccctggtgcgttggcagcccaggtctgggcaggtgtggggcaccccagacagccacatcccagccacttccttcccctctgctcattcatgccctcgtgcctgcttgggcaatgggagttcccagttccctgaccatcatcacgtgaggggacgggtgtgagaggtgacggtgctggtatccaggcagatgctggggttccacagagccctaaaccacaggcctagactggaacaggaagggggcatctggccccaggcagtaaggaaaggccgttgtcttaggagacagacttcccccacctggcaggctggcctaggtcacttagccacaattacccccggcctcacagccccctatgccacctgctctgtccagggacggaatgagcttgcagcgggtagaggagccggggggttaaggacatcaacctcagaggttaggaaggagctaagaggtactggcctggcccagggtcattaaccgcccagtcagtgccccagcccaggtaggcgtggagctcagagaaggcctggcagacagtgctgactcaggcccttccctcaaccccagcaggagccaggtagactgtccagcatgctgtggacgggaccctggcctcctgcctcctgcgcaccctcagaggcccaggagccatcctggaagtccacttcctccgacctgaggtcgcctcccacgctgggctttgtacaacaggaaagctgcgggcattgtgccgggctcctgaccgccaccgcctctggacagagagccagccccatttcttggaagttagcagggaacccacaggcacactcacacccacaccccacaaacagccccgccaggggaggtctggcccttccactgacaggaaaagagacatacgctcaccccccttttcctgactcacacatctctcccctgcctagaaagttgttcctttgaaaagaaaagcattagaggttacagcgaccagggcccccaaccacccgggcctcctcaggggtcccagactgcctcctgtgaaggccgttggctcagctgggagtctctctctctcccagggattttagccacatctggaccagctgggaggcagacagtatcctgagtgtccaagtcaccggcagtggctctgagatctcgtgcaggacaagcccgccacaggggactaaacattaaccctgggggagcccagcacagcacccaggtcctggctgagcaccatcagtgcctgctggacagaggtgtccccaggcaggccaatccccaggaggggctgaagccaggtggcctcggctgtccctgagcaggtctagagagcggctcctccgtgagctggcaggccagcagctggcccagccctgcttggtgtcatgtgatccctgcacccttcccccacccccggggggccctcttctgccagccgggtggtggggaaggatgcaggcccaacactgagagccatgcatgcttggggtaagggagttgccaccctgtcacacagtcggggagacgctctagcccgcgtggagctggcctgtcttctctggtcgcttcccgtcacagcagcagcaggcatggaaccagaccatagagctacgtggagtacaggggctgtttaaaccatctgctcagatggtggaggtgcaggctccagagagagctgccctggggtctgggaacaaagtggcagagtaaggcctctatcccttgccccctcacaggacagagaaagaaagcagccaacagccctggcagctgccccagaaccctctgcagcaagaaaggcagggttccagcacccacaggccaccctaggtcactctgttagcagacagcccatctgggcagcgcctgggccccagggcactctggccgggctgggagctcagagcgggaggagcaggaacggcctagtgaacagctgatgcagagaaaacgctttcccctgagggcaggtgcccaggcagccgctatgagctgactgctaggaggagaaaagaacaccacgtgcttggctgtgtcctcaagggacactcctgtcccacccctagcaggcatgctgatgtccctgggctctgggacccagtcggcagctgtgcctgtaaacacactgtctggccttctaacatttgggtcagtgcagtgagggtggcatggggtccccggtgagcaggggcccccacaccccaatgtctccagggacacagcccagagccctgaagatgaggatgggaaacagggcctggtggtgtctggtgagtgtgtcacctgatcagccttctcagagtgacaggccagcaggatgccgtgtccctggctgacagaaggaggaagccacaggccaaacccagactccctctgggtagaatagtgagggtcttgaggaaccctacggggcctgccccagccctgccatctccccgctcaggccaacggcacctcctcccagcatcagccttctggtgcagctccggactcagacgcctttccttggaaaccgtagctagtggccccctgccccatggatggctccaggaactcaccggcccctcccaaggagacctggctgagggctgaagcggagtgaggagagggctctagcctgcacctcggcctgctccgcccctggtcctccccgggcctgtgtgtggaaaggctcacggcagagcctccgtgtgcgtgagattgtcctgggggacctcccaagcccctctgagctgctgctcaggtcccagtcaccagaggtcaccccggggtgcttgccacccccctgccagcacctcacagttctggcccaccagacagcagctccctgtctctcgctggctctgcccagcccctggccctcggccttggtgtgtcatctggggagggcagcactacctgtcacaggcaacagtgggggtcaagagagaatgcacacagctcggtgaccggcactgggacctgatggcgtggtaccggacaacacctgacatcatatccccctggggccggcgacggatgctgggctgtaaaaacctgagggaaacttgtctgaggcctgcctaaggctcagggacctagccgagggacactgtaaagagaggctgagtcaccctgaaacccagtgggtgggagcagctttctgacttcagctttccgctccaatacagaagccaaacgtaaaacgcatcacagaaggctgctcgctctctacagagcccaggctcctgcgacagtgcggggcccacgctgctgtgcccttctccgtcctacagaggtggggacccatgcccgaggacaggagccggtggggcgtgtgctggctgagccagaggtgagagcccaggacttctcaagtcatgagctcggaccatgagccccatcaagggaggtggaacgcaagggcctcgtgtccgtgtccgtgaccctcctgccctcgggcctgccctccagctccaggtgggtggacccaaccctgatccccagcgcacagacaaagcatcaagatgacaggaggccagcccggggtgtgggtgggccacactcctgatcctgggcatggcagcccacagaggcggcctcagaccgggacgacacgcggtgcctgcccaccaggatgctccctggcctcagaaagtggaggctgggaaccaaccagtgctgagccccgcaaaggccggcccatctctccagaaaccctccctgccggcctgtgccctgctactcactgatgggaaaatcgtgcctcaagcaggaggagggagaaccagacctccaggtcagccgcaagccttgggcatccagggtccctgtccacgcccagcccctgacagtcaggtgaacacagggccaggcccgggaggggcgtggctggtggcagctgaggaggaaggtgggctggtcccaagggggtgcagggcagccccaactttaaccagctacagtgcccagcacatgcgggcacttcctgggtgcaaggccctttggacacccatcacgtttaatcctcctaacgccctgcctgatggacaaggaaacagcctgagaggaactcgcccaggtcaggagccaggacgtggcagccagaacagggatttgaaccctggcctgttgggacccacccaggcctggcgctgcctctgccatggtctcaggcttggagcagagtccagccccttgtggcacagatgtggaggaggggccagagacaggaaggatttcctcaggtcacacagcaaattcgcaggggagggtggcagggccagctttctagcacctgcatctccgagaggtttgtggacgtgccctgggcaaaaggcctacaagacaccaggccagggaagtgccatgctgaaggtgccaggtgacgcacccgaggagcccagggcacttggaagggtcaggccgctcccctggcacctaatcagaaaacctcattgtggcagctgctacctgtccactgtgccaagtgctgtgcaggctgctcctcaggtctcttgtctaactcgagggtcctcaccagaaccctaacaggagagctggcatcatgtccattttacagatgaggaaactgaggctcaggagcacgtctacatctgctagggggctgagctggcatcccagcatagctctcttctctccagagcccaggctccctgcccctcggttgagatggacaaaagtctccaggaatgactacaggggaggctgccaaagcatgcaagcttccccatggaggaaaacgccaaaaccctccaacgcaggtgtcctgccccgcccgccaagccactgttgggctgccatcccactgcctcccccgcccgtgggcagccaaggtgtgcggaactgggagaattgggtctgctcaaagctcagcttgtcctgcatgaggctgcatgcatcagtgtctgccccttaacaatcaaatggggaacactgctctgctgttgctgtatatctgggaacacagtgattctgggcctgcaaggctggaagtccaaccctgggactgggtggccacagcatggtggcaccacgccatgggagccatctgggcggccaaccagcagctcttgggaaccagtccttgactgcctgggtgcagcttcctgaaaccgctccactggctcgttcagagcctgcctgcagagggccagtgataaatctccccactcttttctcattggcaacgcagacaggtcctggaaatgcccaatttccaggttaagaatcagaccccagctctggcaacgagcagcttgatatctcccagggccattcctgagcctcccgggaaacaggccagcatgcctgagcatcccccgcctggagaaggaacaaagacccaggaccagccagcctggtccccctcttctgggggaccctcccgagtagagcaagaggggaacctgagggtcctgggggctgccccttcagagtcacccaggaagctctcctggaagaccacagtctgtacacatgcatgcagggacacacacccacacagggacaggccctttgccttggggtcttcagtgtcaaagtgctcatgagccctggggattaaaccgaagacctgcacacagtgtgatcaagagatcaaacagtgggaagacgcgggaggctgaagggagatgctccctgtgaatacagagaagccctcttcactccagcccacctgcaactgccctcaggccttgggtcagaatcctggccctgccactgaccagcttggtcactctgtgcaatctaattcacctctgttgcctcagtgactttatctgtcaagtgagctcttaacagtcttgaccccaaaaggagatgatgcaaattacttagccaaggacctccccaaaacctgctggctcttattagctgttatcttaaacctgtggggtccagttctgggcttgcttcctccaggtagctctccccagcgtcctgtggcccaaagcacttttgccttcctctgagccataagcttccctactgctcacctgacctcagggcttctgggctgcctgggcttcctctgactcctggtggctcctgcacacagtaggtgccacagagaacacagcccatgcttaaatcctggctgcggcccttgctggctgcacgggtgtttaggtcagagacttcccttctctgaccccctagcttcctagaaggtggtgttggcacctactctgtagggttggtctaaggcagatgaagtgagggggtggcccacaacctgcactttttgtctggccaaagcaacagcctgtccagagatgggggcacggaccaggtcacctccagaaagcaagaactgtgcaggccaagctgggtcattggtggcttggcttagaatcgggaagataagcggaagcccagatgtgaggagatctggcagcccagagggaagcaccgggtggaagctaggtagggaaacagggatgcgggggaaggcagaaactgtctggtggtttccagagaggacagggaccaagtgcgcagcgtcagctctggcaggccacatagacaccaggaaaccagccccaggacggggggtgttggcaggagggacagggacttccccgccccctcccttgggcccttggtaaatggtcattgtgttcagtttccggcagtggcctcctctcctgccaggatcctggttttcctgacccagccagaagcttcccctttgatttctaaatagcagtcgaggtctggatctcagtgctgaggctgggcaaggagcgccagggccagagagagggaagacaagacccccaggcaggggtggggctcagctctgcctctccctcagttcctcagggacggagagagggaacctgcacggccactgtgagcgctccgccggaccctcccagcacacaaagcccgagctgctgccagaggtaatgaaagccagatgagcgctgggctggtgtcagcctcccacccccaccctcccaggggtccctctccagccgccaatgaggaccagagccctggatagatgagggttgagggaacacgtctggtccggccatctgccaagctcaggaggaaagggtctctcaggcgtgtggtgttcccccaccaagagctctgcccaacactgggcggagaaacaagtcgcatccaggccctgtctaggtaccgggacaccaagaggcacgagactcaggctaacaatcgccagcaatcacaacgcgccacagtctaaagccatgaagcgactggagacgcagcaaggcaacacgatgccgcacggggactcaggaggttcactgtgaaggctgcagcccagccaaagctctgatgggccctgagcccccgatccaggaatggcctctgtgcaggccctgtgcccaggcagagcagggcgaggggggcatctctggattccactccctctgctgtgtagtcagcagcagtcaggtgggaggcagatggcaccacccagagacccagggcacacgagaaacaagcccccgccctcacctagtcaccctcccctccatccatcacaggtacaccactcccttctctgaatcctacccagtccttaccgattcagggtgttggcactctttccagttaagcagaaacaagtcttgcccgccctgggcctgggccaccctcctcccctcaccaccaggacatctggtcccacgtgttggaggcctgctgctccaccccatcccccgaccccccccccaccccgctctgagcagccccgatgtccctggtcaccagatccacatctgccccaagtagggtctgtctggaaggcccctatggtctcatcacctctgaggattctaggatttggccttcccgaccacttgttccacacctgcatcgtaaaggctaacgacgcgctgcgggccctgggtgggaactgagtgaaataaggcacaggccaccgatgtaaacagggacagtgccgcagaaaaaggtccacctgggctgcagcggccttggtgacagcaggccctggaacggtattgaggggcgcaaaaccccagccgtggtccctactgttggacggggcgcggcggcagcccccactgcccaccctgctggctgatttctgcagaaggccccgacccccacctatggaggagagaggagggaggcggcccgctgggatcgcccggccccgtccggggctcgccccgacctgcccagctctgccgcgggtggggaggctccgacgcaccccccgcccgaccgccccagctcacccacctccgggcgcggcaggtcggggtctagctgcgtgaagctgtgcagcaccaccgggcagctgtcggggacgcccacctccaggcgcacggcgtcccacacgctgcggctccgccgggagcccggaaacagcggctcggcgccgccagcaggcccggccgcctcggcccacatgcgctgcaccatggaaggctcgcagcgcgggcgcggggccggcccggcgcgcggcgggggcggcggcgcggcccgcgcggctgggctttgccaccgctgtgagcccgcggcccggccctgctgatgtcaggctggggggcggggccggaggggaagagggtggggccggggaggggcggaaccggagagtccgagggacgcgtgcgtgcgcgcgcccgcggccccgccctcgccgaggtcagacccggggcgggaccgggagcctggaggggcggggtctgaacaaagagggcggggccggggaggtcgaggggtgcgcgttggctgggtctcccggaggaccggctgtcacgtgtgtcgtggggccttgggtaccccggttaggcaccgtttgcgtgtcacgctgctgcagtgcgtgtgttgcgtagggctgaaatgtgtacgtgctgatcatgtgtggggaagccgccctggagtcagctaccccgaattccagcaaagcctctccccaactctgtggccttccacaagttgcttaacccctctgagcctcactgtttcttcatctggaaaatctgggtagtgaaaatgacttcctcaaacagttgcggggaggatgacattacgtaatggacatgaagcactcagcactgagcacctgcacctgactacaggctcaggcggagtttggagaggctgaccatgtgttcagtgaccctgtcagtgcaattggaaatcctgagtgtggggctgtgtgtgcagtgggggaaagggtcagagagtggggccctacctttttggggcaaagccccacactatccccttacagacaccctcagaggaggggaagccagggaggtgggggagagcggaaggcaccaaggttggggctgagaggcatctgacaaggaggaaggcatcaagagtgacaacgctgggcagagcacatggctgcgtggcctgtcagctggggctgcttgtggcttggacatccctggtctcagggtggaagtggggctgctggggctgaaggggaagcagggacagggacatcctcaactactctttctggaagccagtgaggaaggaagacagcctggggcttaacagcagggccaggagaatggatgaatgaatgggacccttcctcatgcctcactcatcactgggcctgccctggcctcagccttcagtcttcatggaggccagcaattgctgccagcagccctggccatgccaacctccccaggtctggtccgtactattgggcctcagtttctccatctgtaaactgagagggcgggaccagacagcacattccacgagcacatcttgcccccttcccaagtgccaatcctcagacacccacgaaacacttccactgtgactggagtgaggcggcagttcatccgttcagaacaagacccccatgtgcacacgactagaagggcctacttcacaaaaattatggtggtaagttgcagctgggtggaagctctactggttttcattttacttctctgaatttctaatttctaaaatcagtattttaataatcagctctatgtgataaatgctgtttttgagacagtctcactgtcacccaggctggagtgcagtggtgtgatctcggctcactaaggcctccgcctcttggggtcaagtgattttcctgcctcagcctctcgaggagctgggattataggcacctgccaccatgcccagctagttctgtatttttcgtagagacagggtttcaccatgttggccaggctgatcttgaactcctgacctcaagtgaaccgctcgcctcggcctcccaaagagctgggattacaggcaggagcactacgcccagcctgtttttgttttttttttaagaagcaagatgggtagatttgatttgggatggagatccctagaggctgtttaggaagcctccaagccgtttggccagggagggtaatgtgggtgaggcgtatttcgaggcaggaggtccccacagggccacaaagaggtgaccgagacactgccctcggccctaagctcctcctcccatccctttcttctggggccaagctcccaatgcctccggaaactgaaagtccagaagctgcctgccactgactttatctcctctgctctctttatctccttcgctgagtgatgggcctgggaacaagcgcccacccgttttatagcccagaaggacaagtgactcatgaggacatagaggaatcaccactattctggccttgaaggtcctgggtgctggggcgaggggtggccccaaggaggctggagtggtgaagagtaaagaattcatcacactaaaccccccaacgcggctggcctggctccctcccatctgactatatcatctacaggagccagggcgggggagggcgttacttagccagtccctctggccggtgtctgtttttacaaagttcctcttcctgccttgttcccctacctttgggactcacctcccaacttctgggaagcctgatcactgctctggctgtacatgagacacacacacacagacagacacaaagatacacagagatgcacacacagagacacacacatagagacagagacacagacacacacacacacacagagacacaaagatacacagagatgcacacacagagacacacacagagagacagagacacagacacacacacacacacacagacacacaaagatacacagagatgcacacagagacacacacatagagacagagacacagacacacacacacacacagagacacaaagatacacagagatgcacacacagagacacacacatagagacagagacacagacacacacacacacacagagacacaaagatacacagagatgcacacacagagacacacagagagacagagacacagacacacacacacacagacacaaagatacacagagatgcacacacagacacacacatagagacagagacacagacacacacacacagagacacatacatagagacagagacacagacacacacacagacccacagagacacatagagacagagacacaggcacacacacacacacatagagacagacacagagacacagacgcacagagacagacacaggcacacacatttagagacggagacacacacacagagacattggaacagagacacacacgcagagatagagacacacagacagagacatacctactcagagacatagagacagacacagaggctgggtgtggtggctcatgcctgtaacccagagcttagggaggcagaggcaggatttcttgagcccagaaattggagaccagcctgggcaacatagcaagaccccattctccacaaaaagggaaaaaacaagtttgagatagacacagacacacacacacagatatagagacatagacacagatacacacacatagagacagaaacacagatacacatgcccccctaatgaaggcacagataaagttccctgcacaggatgtgttgcccaatgccctcagatcgggcgggcctgactctgcctcacactgttagcaactggggttggcattcatgggacgcctcctgcatgcaagaccctctcctgaggcctcctgtaagctgtggggacaccctaaccaagggcaaggccatcctgggacagcgtgtgtcaccagtggaggaacgcagcaccactcacagtgttctcctcaaaacccaaacctaaatcaaggcaggcctctgcatataactgccatttgtgggattacaggggacagagaaacatgttcaacacaccacaagggtgcaatccacaaatccaggctgtgggaacctctatgggacaaacaacccagtttcttcaacaaatacatttcagaggaaaaagaaaggggaaactagactaaaagaagggtcagagacgtctaacaaatgcaatgtgtggattttggatcatgatgtcagcaagacaactgtttaaaaaaaacaactataagacatgtggattgtctgaacactgctacatattggatgacattagacatctttttaggtgtgagaatggtgttgccgtcactagtagagttacatcttgggctatctgtggatggcatcacatgcctgggattcatgtaaacatctccaggggcgggcagggagtggggcagtgagaggtgaacaagagtggccctgcaccgatggtcgtgaaagctgggggtctttatgccattttctctatttttgtgtctatttggaattatccataataaaagttataagaagaaaaatggccagacgcagtggctcacgcctgtaattccagcactttgggaggttgagctgggtggatcacttgaggtcaggagttcaagaccagcctggccaacgtggtaaaacctcatctctactaaaaatacaaaaaaattagcctggcatggtgacgcgtgcctgtaatcccagctacttgggaggctgaggcaggagaatcgcttgaacctgggaggtggaggttgcagtgagccgagattgcaccaccgcactccagcctgggcgacaaagcaagactccgtctcaaaaaaagaagaaaaaggacacagcttgagactcaccctctgatgcctctgaggctcccagcagtcctccagagagggctacaaacttctgaccccgggcagtgactcctgccaggctcaccgtttcctgtattactctctgtgggcacaggggtcactgatggcatcttcactacaaaaggggttgggggctctgctgtggggactgaggccgtgggcagctagaacccgagtccggatgcccacatggggctatcagagatggctgggggcagtccaggtgaacttgggtgggtttgacactcaaggccaatgacaaccctgtgcttggcggttggagcctctgctgggaggaactaaggactctcgagatcactaagcactgcccggaagtggggggttcttatgaatcggcattgatcccttcctccctcctgccccagctcacgcccccccacacccccacctagccttcccaggttcccaacctccccccgggacgtgcacctgcctttccttgggggctacaaccacaagcccctggagagcacggctgcacagacctttcggaagtcgggacgctgctcgcagaggaactttaaaaggcaggctgtgaactgacagctggcagccagatcccacccacacatgtgttttgtttggcttgcgaagtgtttttaaaattttaagccaacagtaaaaggtcaggcgacttcacataaaaacccacatttccctcttctcctgtaactctgggtgacctgaccacaccgggtctgtgttcccaagtgccgccggaagctgactgcagctgccccctgtagccagggcatgtgtggggactgctctgacaactgtcccccactcccgcagtgcccagtgcccgacaccctggggagtcactgccaccccggaggggccaccaattcaacatgtgacaacccgaagtggagggaagcagaggaggaagagacggagggggacacacagatggaaactgagcccaagaaccaagagtgagcctgaggaccacagcgagggacagcgggagagggaggcagcaggcagacggaggcgaggagcgattccttgggcatcttaagtcactctctggcccctgagcagctgtctcgtttagggaaaaggtgtgttcaggctgaatctctgtggtccctcttctccctgctcccatacccagacaccgcggccagtggggtcttgatcccgcaaagccccccactgccctcaggcagaagaccactggcttggtgtggccccagctccccactccaggttccctctcagcagaactgctgcagctccttcttcatgccgccccttctgtctggctggtgcgtccctccttccacccattccttggccagtacatccttggccggtacctgagaggcagatcataaaagctgcccctgtggaccttcaagtcgggacccaggcctgccttaacgcagggccccagacagtgggctttgggcctggggtgcagttctgggggctgccggacacacagcagttcagagcgggaactgggcacagggcagtgactgggtgactgtggcctttggccatcaccttttccaacctgggcttggccaaggccgggaggaatggcagccaggtaccctgactcaggtcaggccctggtggaaaacctgtcacctcctgttgggcaggtggaggtcactgacccctttctgtctcttgtgatctatatttagagcctggggaggacatgaaaagggtgaggcctggacacgctccttggtcatttcccaacactgacgtcaccattcctagcctgcctaggtcctggggtggccctctgtgggcgggtgagcacacaccttggcaggaggtgacgcagctggaccacgcgtgggaactcccggcacagcgggcgggcctggctcagccccacctcccctgccactgggttcctggcaacctctggtggcttcttcctcctccttctgccgccaggatgcaggggtccccacaggcgagaggctgaactcagagctggccaggtgagaagcgaagcaccgaaccactgaaatctccaggagaccacactgggtggcagatgtgacagcaaccctctgacctcacggggcgctgccgtcccagcacaaccagaacaaggtgtgccgatgccgggagcagtgcaaacggccctggacggggatgcagagggctccggatcagcctggggctcgctgtggggccctgctgtcatcccttggaaatgggtacacccccggcatattgagggggaggcacgcagaggaacaaacgtgataaatgcatccatgggctgcaaatcgggggccgctcggacagctgtcccccactcctgcagtgctcgctgcctggcactgtgaggagtcactgccacccccgaggggccaccaattcaacatgtgacaggccgaagtggagggaagcagaggagagaggaagacatagagggaaactgaacccaagacccaaaagtgagccggaggaccacagcgggagagggaggcagcaggcagacggaagcgaggagacagggcgcagaggggctgcggggggtgctgggcacacctggctgaggaagggaccaaaggcccagagggtcccatagtctcagcctagtacctgtccccaagcccaggggccctgatcacaaggcagcaacgtctatcccacagctgtgataggtggggcacatcacaccccgaggggccccggcatccatgatctcccctcctggagggtggtcagccgccatcctggccccggactccttggaaatgctccacaaagtgccagctggaaatgtcacagcacagggggccttgggatgagccagccccaaggggccattctttcctgtgggtttggggaactcttttaagatctggagtgcagattcgggttccagtgcctgctctgtgtcttcctagccttagtttcacctcctggggcctcaatttctccatcagtaaaatggggacagtaaccgtcatagcaccagctctcaggcttctcaggggagcagacagtgaagcagtgcacagaagtccttggtaatccaagaagcaccctctggacggagctgccaggacagcccgcagccaccctggactgacccgtggggctgggggcagctggggaggccaagcgtgtgcacacgggcaccagcagcagagcagacccccagtctcctctctcatacccgagatgggagatgaagactcccctgtgagttccaaactcctccaaccagttctggcagggaagaaagggagtcctgggaaagcaactcccatgcctggggctcggcggtgacccacccagcccctccccggcagaggcactggttgccctggaaactcacctcggtggtggccggtgctggcagaggtgccagccaaggtgtcgggctttggagagcggcacgacgggcgacggcccttctcctggcggtcaccacagagacacaggcaaagaacacagagcccttcctccccctgggcacggcaggcctggcacaaacctggcctgcttcccgggccatggtggggcgagagccaggtggggagtgggccctgcgggaggccctctgccagtgtgctcgtcgcctgcgtgccctagtggagtggagcacccgagtgcctgggcctggtgtcacccgcgtggctgtcatacctgctgctgtgacaggcaggaccaggaattcccgcttgtaccaggccatgggccagccgaggacgagtggagaggctgccccaagctagcctagctttctcccttaattctccaagtccccactcccattccccctgtgtcgggggcctggaaaccaccacacagagccagaaaggtgacagatacaagtaaccaaatcaaaacagggttcggtcagcagagccaccaggcggatgtgagtctagccagaggcactgggaggcaggcaggagaccccactcacttgttctggaaggcttccctgccccctagacctgagctcttccatccctggcacccaggcacgagatttcctttcttctttttttttttttttttttccctgagatggaatctcgctctgtcgcccaggctggagtgcagtggtgcgacctcggctcactataacctctacctcccggttcaagtgattctcctgcctcagcctcccaggtatctgggattacaggcacatgccaccatgctcggctaatttttttttgagacatcgtctcactctgtcacccaggctggagtgcagtggcatggtctcggctcactgcacctctgcctcccgggttcaagcgattctcctgcctcagcctcctgggtagctgggactacaggcgcatgccaccacacccagctaatttttgtatttttagtagagatggggcttcactacattggccaggctggtctcaaactcctgacctcgtgatatgcctgcctcagcctcccaaagtgctgggattacaggcatgagccaccacactcagccacttggctaatttttttgtatttttattagagatggggttttgccatgttggccaggctggttcgaactcctgacctcaggtgatccacctgccttggcctcccaaagtggtaagattacaggtgtgagccaccgcacccggccacaagatttcattttaactgggcgcaggggtgggggatgccaatggtttgtttcattaagtagggtggtaaaaaataataatattaccaccactactcccaccattcagaaaaaacaccaccaaaggtaacaagaaagggctgccatcagaaagaagggcaggcttgaaatgagtacatttggcttttagaataatttactagagtgactactggagttgtaaacaaccaccaccaccaccacaacaatacaacaacttactaccttgtccctgtttttctcattttgctgcaaaccagacattggaagccatcagacgcatccaacacacccgtctgacaagtggaaagactgagccccagagagagcagggacttgcccaagatctcacaggaaaagtgtctgtccagctgctctgcaaagcttgcagacgctccttccatcctgacctgggggccagaacactcagagccccaaccccaaagcccagagatgccagggcgaagtcagaggccaagagtctcagctacttccttaccttcctgggaacctggccgggtggatgcccagtccctggctgcaagtggagggcacagggcagggagcagaacagcagaggcggggaggagagggtgtgggcaggggctgtggagtgcccccacaggcacatcaggccctggggcccggcttcccgcccagacactgccccagcagcacctcgctcccagccctgctcctctgagcatctcacatcctcttccggtggctttgtgggccttaggggacccagctgagcagacagttcagggcctgggagctctgccaccctcagggtggagactctcaggggatgtgggtgggcatgtgggggtgggctgggctggggtgggggagcatcagagaaatggagctagagggtttcaggggggccctgaaacctacctccctgtactcaccctgtggccagaacaagtcacctccactaaaatccctccaccatttctgtcccacccagaagagaatcccaagtcctcacctgcccacagccccctcctactaactccagctgccagtgtcctctgctgggaaccatgttcttcccccttggtctcaggactcggcccccagtcagagcagccttctccaacacccctgtcttaatgcagcaacaccatccctgccccagccacccattccctgttctttttcatctggcacacttcctcctctgtgccaggctccaaggccctgtcccctgggaaagtcaggcatcaccactggcctctcttgcgcacagtgactcaaccttgaccttcgaggaacagtagagccaaccaggctgtgaattggtcagcccaggactgaaattctgatccccagggactctggaaccctgggccaatgatttagcatctctgggccttagtttgctccttataaaatgggcacaagggcgctggaggattccacaagaactcagcatgggctcggctcatggccgtgcttggcggatgtgcaatgatcatttccagtggggattgaggagttcaggtgccaaagggttacatgcctgccccggtgccaggcacataacagacatttgatcaatgttggtggatgctgcccctgtgccaggagtgccatagcctgactccatccctggcagcaaggtccagatggcagtccggggtctgcccagtgctcagagtgtggcttgtaactggatcctagcagatagcttggaaatgtttgctgatgtagaagcacacacagatgggtactgcaaggcaggcccggtcccgggagaggggaccagcgaagaggtcactgtctgggtacacactattaacgggagagacgccctgtgcagacaggcaggatctgggtgaggcaggcggcaggggttggtatccgagcagggatccgaggctgtccccagcctcggcctctcaccccggtgttgctgactgcctggccatgtgactgtgggcattgtgtggtgtggttcggctgccactccaggtttaacagggagcttaccacgtggtttgagggggtggggagggctttccctgagcctcggtttccttgtctgcaaagtgtgacctcgcagcctagccccgtagaagggctcagtggccgagaaggtgtttcctacagtgtgcgcatgtttggttgggtggggggcttaaagaggccctggaaagaagcgctcaactttctttttttcttttttttttgtttgagacggagtctcgctctgtcacccaggctggagtgcagtggcgccatctcggctcactgcaacctccgactcccgggttcaagcgagtctcctgtctcagcctcccgagtagctgggataacaggcatgcggcaccacgcccagctaatttttgtatttttagtagagatggggttttacatgttggccaggatggtctcaaactcctgacgtcgagatccgcccgccttggcctcccaaaatgctgggattacaggcgtgagccaccgtgcctggccagaagcgctcaactttcatagtgggggtgggggaccagtagggaagtggcagggaaccaggccaccctgctggtgtgtttgtgagctaatgcctttgcttggacaagcagctcccgggtaccaggccctctgcagggccttgcatctctcacacaagctttctgtgctattcttgaatagcccactccagcccagcttcccaagcctgttacccccatatctcccctgcccccacctccagcacaggtcagcctggcctcagggcctaatcctggggctcctcctttcggagccagggtgggcagggctacccggggcagtgggcactgagcttgctggaaaggccatcgagggactgctgacacagtcaggctgcaggaggagcagcaccagctgccacgcagaaatgcaggagtcccgaggaggtggtgctggcaggaggggagcagcagggccatgcacccctcctcccacccacgtggtccctggccctgcctctgccgccagcctgggggagagcagggtctttgttccctgctggccaggccgccacgtgatgcgccacatcactgtcactgcctggaacgaagactgccatggacagccgaggcgctggggcctgggggtgaggccagttggaggagctccacctgcagcctccccaccgcaactctggctgccttcaggagctgggcctagtgagggccatacatggcacaaacatttccagctactgtgcatgaagcttacgacgaccctgaccccaggcttctcccaggacacacgacctaccagtggtcccacgatgctctgcccagcacgccgggtggcctgggataatgcacctggccacacacacaagcccaggctagcaaaacccaacccacaggcacctttctaggtaggggcaggccctggctgggtgtgaggcccattgtttacaaacactgtgcagctgtcgctaggagctgtgactcagagccagagcagtgactcctcgcgaagctgtttactcggcaccacatcctgtccaggaagcagatagcagaggccgaggcctggcttttgctcctctttcctgctgctaacttgactcagggagctgctggccagactcggtgtccagctggggggacactccagctcccctccccctggcttctgggaacctgaggccccgtcaagtcgctcaacacacattcaggcccagccggctctgctaggtagtgatgctgtggtcgtgcaggagacagatcctgcccctggaggctgcacctatgcctggcatcccctccctctttggctctgactaggagactcccagggacgggggcatcactgacacctgtcactgtgcagcccagaggcaaattcttgccacgttcagaagcctggcaggcaggatcaactcctgacaccccttcgtaccctagagcctagtctggcgccgcctttagcacacctcaatggggacaaagcacttttccagacagcctctgccagaaagatgaggccacagtcatcatctctgttgtaaaactgagaaaactgaggcccagagagggcgaacaacttgcctgatgtcacacagcgtgtcagtgccaaggcagggtgtaagtccggcccccaaggctgcttgctttcctctactctgttccaaattaaggatcacaagtagatttgttccaggcagcacacagacttgacgctgctgggaccctgtccctggggtgggtggtctgtcccctgtaggaggcctaggctggggactctgacttccatttctgctgatcactgctgcctccaacctggcgcctaaaccagagtcaacaaccctctgataatttctactacgcactgccatgccaatgcgggtatcatttcaccatcatgatatgtgacgcaggttttgcaggtgagtttgaggatgaagctcagagatggcacaaagctcatccaaagccacacagcagagcagggcttccaatcctgtctgactctcaggtttgcgctcccagtcactccttcctgcaaactcctagcaggaagactctttatgacttttcataaagagtcaaaggtgattttatcctcacggtgcccttctaagttcagggtgcaagtatctcaatgacctccagttcacaggagggcccctgtgtgtggtggggaggcagagccgcagaatgacttgtggaaggctacacaccccagtggggaggacctttcccctgctccaggctagggagacccggggactcccaggagcagcagagccacaggacacacctgccaaggcatgtggaaggtgggccaccctggagtggggagagaaaggcaaagaggggctgtgcttattttggcagttggggcttggcaccaccccaggcaggacagtaattcagcaactggctgattcacccaccgcagggctcccctgcactggctgcctgcccgccggcccctattaccagcccactgagtcacgcaggttgccaagaagctgaggatccaagaatccaggccctgccccagccgctcccattggctttgagcccagcaggacccagccctgccaagggcaccgcagctcccctccccaaccctgcctgcccccaggtccagctccaggaggaacccaacgtctaactgtaaggatccaagcagtggctgggagctggggcctacagtgtcaggagtcttgggccaaaccctcatcctgtcacttcctggctgggtggagctgggtgagccaggcaggttcctttcccttgctgagccttggttctagcccatcaacagggaacatctctgcctcaaaaagactgcatgctgaaatgaaacactggatgggaagcactcaagatagggcctggcacatgctccgtgtcaaaaaaatggcaccccaaggtggcatcctctgcagggaagaaccagagttcttattttgaattcaaggccagctgatacttctgtaaaatgcaggtgaaatgttgcagcaatgtcaactgccatagagtttctaaacaatgtccatttctctactgaaggagatgaggatcagtaacagagtttgtagcctgcactgtctgcagaccacagagagggcccggggcacaactatattcacacagccagaccacgcgaatttactgaacacctactaggtgccgggcactattcaagtgccagcgatagaccagggaaaaacacaacacataaaaatcacctttggcctaggtcataataagtaaaatgcatttttgaaaataagaatgctccagaaggcaaaaacagaacagggaaggctgatggggcccatggggcaggagcaggtgctacaactgcagacaggccaggagggctgagggggcagcgcgggtatggatggaaggagggacattaaaacatttcaccttggccgggcgcggtggctcacgcctgtaatcccagcactttgggaggccaaggcaagtgaatcacttgagctcaggagttcgagaccagcctggtcaatgtggtgaaaccctgcatctactaaaaatacaaaaaaactagctcgggtgcggtggctcacgcctgtaatcccagcactttgggaggccgaggcgggtggatcatgaggtcaggagttcaagaccagcctggctaacatggtgaaaccctgtttctactaaaaatacaaaaattagccaggcgtggtggcggcgcctgtaaccccagctactcgggaggctgaggcagagaactgcttgaacctgggaggcagaggttgcagtgaccaagatcgtgccactgcactccagcctgggcgacagagcaagactccatctcaaaaacaaacaaaaaaactagctgggcatggtggtgcgtgcctgtaatcccagctactcaggaggctgaggcaggagactggcttaaatccaggaggtggaggttgcagtgagctgagatagcaccactgcatactccagcctaggcgacagagcaagacttcgtctcaaaaaacgaaacaaggctgggcgtggtggcttacgcctgtaatcccagcactttgggaggccgaggcgggcggatcacttgagctcaggagtttgagaccagcctggccaacacggtaaaaccccatctctactaaaaatacaaaaaatagacgggtgtggtggtgcacctgtagtcccagctactcgggaggctgaagcgggagaaccacttgaacccgggaggtaaaggttgcagtgagctgagatcgtgccactgcactccagcctgggcgacagagcaagactccgtctcaaaacaaaacaacacaattcacctaccacggggtcctttcatgccccccatggcggggagtttgtaagctccttgagagcagggactctgttccccagggtcctgatgcctagaacagcatctagcacacagctggctctccataaatgcctagatgaacaagtgagctcgatgggccagactctaaaatattcggaggttcttgtgggaagatcaccaggagagctccttggaagaggtgatgaggctggagaggagcctgagggagggcagggggccggagggccagggaagggcggggcgcctctgctcacctggctccctcccattaaagtgctttccccccaggaaccaggctgagaagagaggcagaggcaagccaggcgggggaagagcgaggaggaaggcagccaggctttctgggaagcaagagccctttttcttagaagcagggccctggagtttcccagaagccagcctgccctgggacggtggaggcggtggtaggtggtcaggttggccctggtttaacctagggggttttcccttcctaaattcctggcccaggaacaattcttggggaatgggtctctgttcacaggtaagtagaagttgctctgctgtgggcagagacccctccccaaggcacagccgtggctggtgaggatgggggatgggggctgagcccacagtcaggcccctgtgtccagcaggccctggtcgcccagtgcgctcgggccaggggaaccaggacaaacgggcccttgtggttgggaggctgcctgccgtgccagggacactgtgtgcccggtgccgccaccagcctgctgcctgcctgaaggggctgagggcctgggaagtggggctactgtttccaaagggaacctcctaagctgccctggcctctggagagggcacagggccttggctggctgccaggaggtggcagggctggtgcccgctgccctctttctcacagtcctttgcctgcaagaagttccccagggctagagaagcgcaatcccttgggactctagggccctgggtctgagggacactgctgtgtcccaccctcctgccacccactgtcccgttaatccctgggcttggctccttccttggcttctcccctggaaggcgaggctcaagggcctctcctatctgcctcacctgggatgcctgacaaaggacagcaaggtaccagctgccctcccctgcccagggaccctccaagagctgttcaggtctccatgccagcatcatggtgggcagctgggtgtgccaggcagtggctgagcagttcccagccaccacaaccctgtgagctgggtccggctgtcaacccagtgacacatgagaaaactgacactcagccctcctcatggtcacggctccggcctgggcctggtgctttgtttgtttgtttatctgagacagagccttgttctgtcacccaggctggagtgatctcggctcgctgcaacctctgcctcccaggttcaagcaattctcctgcctcagcctcccgagtagctggaattacaggtgtgcaccaccacgcccggctaatttttgtatttttagtagagatggggtttcaccgtgttagccaggctggcctcaaactcctgacctcaggtgatccacctgcctcgacttccaaaatgctgggagtacaggcatgagccaccgcacctgtccaggtctagtgctttaaaaaggcaaaatgcaaacccccactccctcccacactcactgtggcaacgtgctgtccctccccaggcaccagccatgtgtccccacacgcagccacacataccccttcatatatgtgctccctcagccactgtcaagcttgtcacatctgagcacatgcatgctgcagacatacagggtcacccaaaggcagagagatgcacctgcccccaacacacgtgctagaatgcacatgtgccccaccgcatcccacagcacacagccgctgcccctgcaggcccagaggccctggatacacaccctgctccctgcatatctgccagacagcaatctcctcagggctgcggagaggggaggaggcagggctccatgcagggactccccgaccccagaagctgggaaggaaacacctcatggagtcctgaagaacggcaagcggctatttcgagggggcagggggaccaggcaggcggtgccgccagctgagaccttccacactgggcactacccacctgcccactacccccagctgtcacctccccagccacccagggcctggggccaggtggactgcttcacccttgaactccagtcctgtcaactgggcagcagggcctggaacttggcctcagggaagaagggggtcgggggagagtgggatgcgtggcctgggcaacttactcgcctcctcggggccgtagttcccctacctgaaaaaaacctgtggattcaacttagggcctgcaagtgtccctgccctccacccacaccctggctccccaagggcagcgggagctggtgggccatcggccatctcccttctgcgaagcggagcagacattggctgccatctgcggagggcctgcccatgcggtgccaggggcctcaggaacatctcatactcccccacatccgtaggcccacagaggaggcaatgggggtacagaggagttaaggaacccacttgtctgggtcccctgaggccaagccagggctcccatcccacctcccaggcttctctccccttgacctctagacagcccgaacttccctgcggctgctgttcctggtgaacatcgtgacagatgacagcactagtcaggtgattaatcagctgatcacttgatcatcgggacagataagtgctgctgcagctatagcccagcaggggtggggtggggtggggtgggagcgggaatccctttggaatggattcaggtcaggtggtggcagcccccaggacttaaataccttctgccaccctccccatggtcccaccctccccacggtcccaccctcccagttttgaacttacattacaggcaaagggcacccccccacacacacatctgggatcaggacaaagtcccaagaggggcgggtgccagaggtgggggaagttcctggactcagggcctctggttggccaagggtgctttcttctttctctccactggacaagcccacccctccctgccttcctccctcggaacacaaaggtcagatgggcacacctgacctctcgggtggtgtccagcagagaggtcctgcacccttcccatgggagccctttctggaccctaacctagaaagagggaaggactggggtgccctccagcaggcagtgggtcccggccccccttatccttcccagaaggactgggcagctcaattcagttaattatgtgcccaccatgcagtgcagggaggggaggccaacgtgggggagggggtggggaaggtccttagtgcagcacccacgcagggtgggtggggctgtgtgcctgaatcttccctcccaccaactggcttcctgcagcctgttccttggtgctgggctgggggctcgcctcatccgcccgccttcttggcgtggcatccggcaagaacgtgggccggggctgcacgcaccttgggctgtgggccggcagctccccgccactgtctgtgctgccctctgccctgcccctcctcctgtggcactccagctgggggtggctgggcagagtccccatgggatcaccctgagcccagccgacgacccccaagtgaacatacgagcccagtacccaactccggaggtgggcacaccccttgcccatttgacagatggggcaagggaggctcagaggggtgaaatcatgacccagggtcacacagtgagcaaatgaccagggtcagactggcatcctggctccatgagagcaccgggagttcctgcagagttgtcaccaacagtcctaccctcactgccatccccagagagaacatctgaggcaaccaggtctcatagccttcccatccccaaagtccaacccactgggcagtgtggccccacctgccttttcccaccattctactgccccaccctctcccagggtctggggctccacctcgctccttccaggctggacacccctcatccatgttctcacctcggctcccgcagtgcccaagtctgggtgcagggtgggtgcccacaaactaaggcagcccctatgggagcccaagggcagggctttcttacaccctcacagcaactgcggggacctcagggcagacagggaggctcagaggggacctgtgctgcttctaggatgcccagcaataagcgctgagctggaatttggacccaggtgtcctgctccaaagccacctgcctcacctgaggaccaggggcctgatggccgaggtggatgccgacatgtgaggaggaagggcagtggcggcctggtcctggtcccctcactctcctgccccaaggccccagtaggtgacataattcacagggcaatgtttatgcactgaacggtaaacacacaggcagaggggtagatgggccaccaatggggaaactgaggccagcgagaagggacacactaaggtcacatagtcagtcggtatcaaagttggcccagaaccacagtcccctgttccaagggctgtacccagcccaaccacaacctggcatgccatccagccccaggccagggagcccacggctgcagggcggcaaagcacacggtaccacacgtggtaccccatggccccacacactctggctggcaccgagccatcgctgtgctttctgaccttgcgttttctgacattctgccactgtcaactctcactcaggtatccaggaagcggcctctgttgctaggggactggcttgatgccgggtggctggcagagtggggagatggggaggggggagtggactggggtgtccctcaggaaggatccaggggcagagtctactgggtcctgtgtcagggtggagggccatgagaagtatctgaggaaactcagcaggtcaggccccttcctccccaggctctaatgaaggtcctggaccctggtctctgcattttctctttcagcctcagagtcttctttttgggccaggggtgggtgtgcgctggtgggggttggaagtgagccatcggaaagcccatcggaaagccccagcccggagccttcctgcaggcaagtattttgggggccagcagttgccaagcaactgctctgggttgccacgggaacactcccttttttctggggcttgtcattcttagggggatgccacaatgcttcccgttccctttcctctccacttcctcaccctggcttggctgccctgggaggggacactgggagtccataagctcacaccccacccctatgggggggcccacatacccctggccctaagactctttgaggctccagaatcaagaacccccaaaatgcaaagcccagagtccaaggccttcattagagcagggagacgatgaaaggggctcattagctctgtttatgtctccttgccgccattaaccaccacttggggcctagggcctcccagccccgccctgcccagcagccgggcccagccctgaccgttggaaggccactgtaattggaaggaatgtggtcctggtgcctggcccttcccaggcttgtgtgcacacggggaggcgccattgccaagctgccactacctagctgtgggagttccttccccttccagtgcctcagtttccccacctggaagtgaggatggcagtggcacttatcttgcagagtgctgagcagatacaagggacactttagcacaaggcctacaggctggctgtcatcaccaggcacctctgcagcaggggacagagggaaggactctgtggagaatagtcctgtggctagcgtgcaatggtgactgaccacgccactgatggcagagtggccactgaatccaggtccccaggctcgcagcccatgccttctccacaagatctgtctgccccatacccctgagccttccacagaagccagggtgcttcccacaggccaggcacccagcgccagccaggtgtacagaggccagtatctgctgtgtgaatcaatcgctgaaccaactgtcaaggaccagcagcctcaggggcgggcctggtagctcggtgagcgaggaggtggtgggagggccttgtgcgggtagggaggtgacagtaagaaatggcctcttgctggatgcagtgtctcaagcctttaatcctagcagtttgggaggccgaggcggggggaatcccttgagcccaggtgtttgagaccagcctgggcaacatggtgaaactgtttctacaaaaaaaatccaaaaattagctgggagtgttggcgtgcacctgccgccccagctactctggaggtctgagcccaggaggtcgaggacgcagtgagccgtgatctggcccctgcactgcagcctgggccacagagcaagaccctgtctcaataataataataataataataataataataataacaacaacaacaacaataataataataataataataataataataataaaataaaggaatggcttccactcattccactcctgggccagcggcccgctgtgcactccgctccctttcgctgatgccatgtgagcagctccatggcggggacctgacccctgctcctcagccccacactgcctcgcccctttgtatatcaaaggcgcctctgaggggctgtgctgacccccaccaggagcagcaggaccacctcaggcatcccagctcccctgaggcagggtctggggctggggttggggggaaggacccctcaagtctctatctgcacagacagcccacccgtgcccagggctgccttccgagcacccgcagacctgggcctgcagtaacaggagagctatctgcaaaccgcagtgtcatcagccgcacggcctctggagaggcctgagaaaggccggctcagcttgcaggcgaggaaccaaacgaaaggcaaactcctggcccctgcagcctcgcaggtcccctatccctcctccctgccttcctttccgccccgctgacaccacggtctgcaaaccatggtcctcctcgccacccctgtcacctcctcctccgccccccgccggcctccgacgcaaagtcgccacccagtcaccccgcctcggccccgcctggtttgatttcctcccgtgtgtgtcacccatgaggtggccgtgcccctggcctgtttacagctgtgcgcaagctcctcgcgacccgaaagcgagacctttgtctgcggcagctccgcgccgggctgggcggccgcacgggagggcacagcgccacctgctggtgctgccgccagagcgcgccaagctgaggagcaggcgggctccgctcacgcccccacaccccctggctgggggctgggttcctgcgatgtcttccgactccccgctgctcccctagtccccgtaggcacgcgggtacccggcctttgggagggggatcattcccaatactcctgttacgggttgaactgtgtccctgaacaaaaagatctctggtacccgtgaatgagatcttatttggaaatagggtctgtgcggatagaatccggatgaggtcatactggattagggtgggccttaatccaatgactgctatccttatgataacagggaaaattggacagacacgcacaggcggacagacacgaactgatgaaggcacagtttgcagtcacacgtctacaaaaccaggaacgaatgccaaggaaactggcagccaccagaggttggaagatgcaaggaagtatcctctcctagaaccttcagagacagcatggccttgctgacccctggattttggacttctggcctttagaactgtgagagaatacatttctgttgtgttgagccacccagcactttgtgacagcagcccaggaagctgacccgatagacactggtcccagtcatcaccctctgtgccatcaccacacctcccctccacgaatcaaccacgaccacaggacacctccttctggaatctctctgtgcccacgcactccccagatgagcacttccccttcccctggcaactccccggattcttgttacccccaccccccgccccggcatggcctgggcccaggagacagatacgaaatgaatgagtgaatatccacctttgctacttcgtcatattcagatgttcgtaaaaatctgtatgttcgtcatattcagatgttcgtaaaaatcaagtggcagcagtgctgggggttaaggaaatggggagagtgatggcagatgtgtgaggggagacaaggggcacttccaggtactcacagccaccctgggagctgggacagccaaccagtgtgttctcatgctcccagcccctgaggctcagagaggggaagccatctgggtcaccaagctcctgcctcttgccagttctgtgaccccaaactagccattgtgcctttcagggcctccccagtctcctgacctgcacaatggggatggttctaacgtctacttcctggggacatcaccacgctaatgtgagacaatactacaaaacctgttagctgcctcacagacttagagatggaaggattaggaaggaaaagggccttcagagactgcagggtcctgctgacccctggattttggacctctggcctttacaactgtgaggaaagaaacttctcacaggggcgagacacagcccggaatacaagtcggacaggctgggcactggtgctgtgatctggggaaagtcactcccttcttggtctggtttcctcatttgcaccatgaacgggttgaaaatgaagcaaaaatcagatatcggccccctgtggcatatgggagcatcttccaatgggaacaccttccaatggctcccatgatgtttgtttgtttgtttgttcgtttgtttattgagacagggtctggctccgtcgcccaggctggagtgcagtggcatgatcttggctcactgcactcatcacctcccaggttcaagtgattttcctgcctcagcctccggagtagctgggattataggcacctgccgagacacccagctaatttttgtatttcttttttgtagagacggggtttcaccacgttggccaggctggtgttgaactcctgacctcaggtgatccacccgcctcggcctcccaaaatgctgagattacaggtgtgagccaccgcgcccagcctccgttatgtttagaatcaggcctgactgcctcctctcagacactgtcccaggcagcctccacactggccccagagatccctgcctcctggtacataagttgctgagtgatccccttcctccgagggtgattggatttagtgactggcttctcaccaacagaacacagcacaggtgatgtgaggtcacttccaagatttacaaaaaactatgacttctgtcttgcttgtttgctcttgttttcctccccaccttcacccctcactctggggaagtgagttctgatgccgtgagctgcctgccctacagagagacccacatggcagtgaaccaagggagggcccccaccaacagtcacagaagaactgatgccctcagtcaaaactgaatcctgccaataacatgagaatggcctgggggcgggtcctgcccagtccagccatggatgagaccccagtcccagcctcccttgagacctgggggcagaggcacccagctgagctgccctggatctgggtccacagaaactgtgtgatgatcaatgtctgttgctggaagctgtacattagggtagtgttgtcacatagctgtccacaggcccctgggctgcccctcccacccccagctcacttgggccacactggcctcctttctcactcctctctggccaaactcatttctgcctcccagccctgcctgctgagccttctccatcacactgtccagactcgtgcagggctggcccatgctttgtcttctggtcacagcacagatgtccccttagcgagacctctcagatccccacccagcaggccccagccctccatggcagccccggcattattttcgctgcagcactgctttttcctttctgtgcctgtttgcttttgtgccctgtccatcgccccctccagactgccagctctggagggcaggcccccctgggtcactttcagagccacacccaagcccaacgctgcccccccacaacccagggtgagtgcttgggcacacctgctgaagggaaagaggaagctcttggagccccctcccgcctctgagcagctaacattgtggagagggatgctagtaatggggggtgtgcattgggtagaggccggggtcccccagagggaccctgccgggctctccctgactccagttgctccaatgagtacagtgggcactgcctccccctggtggccggcactagcacagcagcagcagcctcaggcagaaaacccagaaaacaaaacacacacctttgtttgggtgttgtcaaggtagcagctctcctgagtcccagggggtcaaaggagcagaacctgcaggctccaggggtaattcaaggcgcctcagaagcttcatttgctcccctctttccctctgctggtcctggggtgtccagttcactcgtgaggcctcctcactccaaccagggcaacggctctggccccacttccaaataagaaccctgaggctccaacaaggacagtcttgtcccacaagagttgtccagtgcttggccacgctctgcaccaccccaggccctcagcccttcagcccccccggcttctcttgctcagaagaacctccaagaagaaggcattttccacagacctcggtgggtagtgggggcatccccagtggagacctaaggccgacagacacgtctacgagcctgtgggacccttggagtcacccaggccaaacattccaatttatagagcaggaatttgaggcttcctttcctacagccccgtccacactgaaggggtcttttcctgcttccaggtgatcacagcggtgaacacagaaccccacaatctgtcctctccaggctgccccagcccagacagatcctgggaaccttggagaatccccgcccatcaagctggcgtgtcctccccttgccccccaccccgtgccatggccccaggcatgttgctgggtactggatgcccctgcccgtggcagagtagcccccgccctctttcttctttcccccagtcacttccccagcgtcccgtcctactctgagccccaggaagtgtgtggtgtgtgtgtctgcgtgtgtgtgagcatgtatgcgcaggcctgcgcctgtacgtgcgcggagaagcccaggcaaatgagcccacatgggagatgggcaggggtccccaggatcttagaggctgtcattcccaaagcaaaccccacgggaagggtgagccgagcccttcctggcctaagaggccggaaccctcccttcatctctggactccgccaacttcgtgtgccccgggcgagtccctgcccctctcctgtcctcagtttccctactgtcccgggcggggttggacgcggagctgcgtaagcgcacgctcagcgtggacgcggcgccgggctccctccccccggtgggtgtgggctggggcatacggtcctccctccacccgcgacgcgaggctggggacggcgcgcactcacctggcaatctaccatcatcctcagcctcggtggcacatcgccggccccagggcgggacccggggctcgcagaggccgctcgcctgggcccgcgcgcggcgcaggggtgcgcccggctgcggggctcatggcgcggcctccggtccccgccgggcccaggactctgcggccctcggggccgccccggcagccgccagcgccgctcccattgtctgcgccgcgccgcgctccggccgctcgggcctcgccgctcggttccgccccggctccccgggctcgggcccgggtgggcggggacagccgcggccccgccccagcccgcccgcaggtgcgaggggcgcgccccgccgcgtgagctcggggacgcgctcgggggcgcgctcaggcctccctcccgcgggccgacgcgggtgttccccccgcggggcagccgggcctgttgtccaaggccgggcgcgcacacggggcctgcgcgggaccgcagacagcgcgtgcacgtcactccgcttcgccgcgcgcacgcgccacgctcccagcgccatgtgcggccgatctcacgtgtccgtccgccccagccgcctgctcagtactccccaccccgctaggacctagggccaacctcgccccagccaggcgggggccgctgagtcggcgcgccggcgtcaccaaatatacacgttcaccctggcgcccagcaccccgatgccacctgctggactcggctcggcggatggctgggagctgggggacccgaggtgacagcgaactcagcctgggcagggagaaagtcaggtctccccttcccctcctcttccccacctccctccttgtcttccctgacagcacccgggaccacaaggtccagctgcagcttcagctggtgtaagatggggctcaagggagcctgggggaaggaggcctcacactggggttgagcgactgttgggggtagtcagtgttattagggctaactgatttcgtccctttttattttttatttacttttgtttttgagatggagtctcgtttgtttgttttttgagacgaagtctcactcttgtcccccaggctggagtgcaatggcgcgatctcggctcactgcaacctccacgtcccaggttcaagcaattctcctgcctcagcctcctgagtagctgggattacaggcacctgccaccacgcccggctaattttgtatttttagtagagatggggtttcaccatgttggccaggctggtctcaaactccagacgtcaggtgatcctcccaccttggcctcccaaagtgctgggattacaggcatgagccactgcaccagccgcagtctccttcttgtcgaccaggctggaatgcagtggctagatcacggcttattgcaacctctgcctcctgggttcaagcgattctcctgtctcagcctcccaagtagctgggattacaggtgcacgctgccaccaccacgcccgactaatttttgtgtttttagtagagacagagtttcaccatattggccaggctggtctcgaacttctgacctcaggtgatctgccctcctcggcctcccaaagtgttgggattacaggcgtgagccactttgcctggccaacccttttgatttatttatttattttatttttttgagacagagtctcactctgtcacccagactggagtgcaatggcacagtctcagctcactgcaacctccacctcccaggttcaagtgattctcccgtctcagcctcccgagtagctgggactacaggcatgtgccatcacacccggctaatttttgtatttttagtagaggcggggtttcactatgttggccaggctggtctggaacttctgacctcgtaatctgcccaccttggcctcccaaagtgctgggattacaggcgtgagccactgtgcccggccttttttatttttaaaaaaactatgtagagatgaagtctcactatgttgcccaggctggtttggaactcttgggctccagagatcctcctgccttggcctcccaaagtgccgcaattacaggcgtgagccactgtgcccggcttcattcaattttataccagagccaaggcaccagcactgcaggccactcagctgtaagtggccaggccctgctgtgcgtggtgacccccacttcatggctcttccccgtcactcatccccgagctggtcatcagaggcctcatcctgtgttggggcctcgctggccaggtatcccctgagtccagcgcttgggccccatatatattgatccccctgctgggacaggcctgcggtgacccctgcctcctagcctggcattcagaaccctgtgtgacctggtccctataccccaactctagcctcctggggccatcctgacccagggaccccatcaagcccctgcccctctcagagccccctgccagcactgcccctccctgtatcctcctccacaatgcactcaccttcagagctgcactcctcccaccctgtgcagagcacagtcttgaacccagatgacctgggttcaaacctgcagctgagccacatcacaggcaagctcatggtgacctctcagagtctcagtttcctctactgaaaatgagtcagggactcccacccgggagggtgtgccaggggtaaagctgggtgtaagtggggtgaggggggtatgggggacttctcccctgctaggtggagctgcccaggcctcagagtctgctgtcacctcaggtcccccatctcccagccatccacccagctgagtccagcgctccatggccctctctgtgctttcaacagaagctcctcggaggcagggcctactccttcagcacagaacccctcccctggagcaggtgctccctatgagggacacagaggccatggttccattcctgcccctctgcccaggaggcactcagtgccccttcaagactccaggcctctccagcccagtctgtctcctccaactggtcactccatctgtccacgctcttcgggtctgtccctgctcgccagccaaaccacaggtgaaggaagaatgaactcagggctggccccagcttttccacgggtgaccaagtgggtgggtgcctgcccgttccagtatgaccagagtctaccccaccctcctttctgtcttctccttccatgaaaaagatgctgctgtctccagggcggtgagcaccaggccgccaagccctgaacccataccccaccccatctctgcgtggccaggcagacagaaccacactgtaggcctctgaagtccttctggatccagactggagaggtcatcttcccatgccctctaatcctggcctgcaccattggctcagagtcccacgcccactggtgacctcacagggctgcagtgaccctggatacgggagctcccagggttgtccggctgctgggctccatacccctctacacagttgggagtgtggtggctctgccagcatgctccacttcacccagtctccctggagaactggaatgaaatcctgtccgttgtagcctctagctttagctcagattttctggagtaactatatccctattcgattgtgtttgacttccagtctgcctgtgtccccactgcctgatggaacagacactggggacacaggcaggctggatgtgcaggtaaaaaccaccttagtggccgggcacagtggctcacacctgtaatcccagcactttgggaggtcgaggcaggtggatcacttgaggccaggagtttgagacaagcctggccaacacggtgaaaccccgtctctactaaaaatacaaaaattaactgggtgtggcgggcacctgtaatcccagctacttgggagtctgaggcaggagaatcgcttgaacctgggagccagaggttgcagtgagccaagatcacgccactgaactccagcctgggtgacaagagcgaaactcggtctcaaaaaaaacaaaaacaaaacaaaaaaaatcaccctagctagggttgagcacacgccccctttattataaactgccccaaaccctcttaagaaggaggtggctagtcccctgagagtgcggctcactttggggtgcaggaaaccgagggagcctagacctgttccatttcaaaggctcactctgggggcctgagtgaggaattggctacatgtggttgggagacatcaaaggacccaggacccctgtgaccagagaaaaggggtctagggcgccttcacaccagggtattagaaatgctacgttaagggcaatatgcaataaacgggggactggcgcggcagggttcaggcactctgagtcgggctgaggcttcagagcctgccccgcaaaggcacggctgcagaacgtggcaagcctgccgggccctgcctttgtaactgcgcctcccctccccctgtctcactgttcccatgccgcgttactgtgagatcctgtgtgctactgtgtgcacagccctctgcagttcacagtggcctttccacgtcccttttccggttgaattcgcctgactgacagggaggcgggacagggctggtctgcacgctagtgaagcactggtggctgcaggtctttgggtccccatccatggcaacccccagctccgtggtcagctcctcaggcagctgatatccttgtccagtgtagaaaagcggatcagcttcaggctgggtggctggggcttcctgtcgtcccagaggtactcgggggacagcaccttggacggcttgtttgagatgaagtgacggttcaggtggctttcctcccgccaggcagccatgatgccattggccttgtccgccaggatggccatgtggcagcccctagtaaactcatataccctggccacctgccccccgaagactgccccaccataatagaagtccccttcgctgtctgccacaaaggcagtggaaacacgcctgcgctcataggggaactgctggcggggaacggcgtagtagcttgggtgaatggcagccaccaggtctcccaaggtctcagggccccacgggttccgaaacaccatgtccacatcaaggcagaagaggtagtccacctcccggtgagccctcttagcaatgtgctggctgatggtctccatccggcgcatggatgtctcctcccagtgggagtgaccctggatggggatggagctgagaagccggtggggacccagcgggaccccgggaacggctgcagggttgtcagtgaagatgtagtagtgcacccggtacccacgcatgaagaactcctcggctgactccaggaaggactggatgaaatgagtgtacctagtgatgatcacccggtcacccactgctacaccagcagcctgccagggtccccactgtgtgctggggtcagccaggctggggtccacttaccagctccccatctcaagatgtcactctgctctggccctctgggtcctcatttgtccaattcccaaaatgctagtaccagcctcttacggctgttgtaagcatgttcctggtagagattcttatgctcctaggccaggtgaacttttactgagcaatttctaagtgcccagcgacgttctaagaattcttatgatctttgatctgcataagcatgcccattttacaggcaggaacattgaggatcacagagaagaaagtagtgaagaagcaggtaagtggacgaatcaagggaaggcaagttgagctagatgctgggggcatggaggggggtgtggttgacacagccctgcccccaggccaaaactcattggacaagggggtcacctgaccctaggtggaccattcatcatctggtcatgctttagggccccaggaagttccaggaaggagtcccagaggcccagaggaaggctgccaagcggcagctcctaaaggaaggccaggtggggtcatgggagagacaagggcagaggaggggtctagatgaaacagggaggggcaagggggcctcctgacaaaggctcctgctgtcccctcacctggactctgcatcctgtctatgctagagccagatcccctactccaggaagctcccatcccactatcacaccctacactgtactttctatctgcttggcacctggttccgagcctcccgggtgcccagcagggtcctgtgtgcacgtctggtctggtctcttcccaactataaactcctgtggctcagggagacctccctccccttccccagcccactactcacttccccacggcaaacaccgtgaccccaatggtcaggttcagtggctggtagatgtgctgcagaagctctgggttgaaggttccctcggagacgatgggcgccaaccagggtgtgagtgtcagcagctgtgtgggcctggcagcaggggggccgtgggcactgagaccctcccctgtgaaagcctaagtctcatcccagccctggctctcacactgtgtgacccggggcagcttcgtccccatctctgggcctccctttcctcatatggaaagtggggataatgatagccacctcccagcagggttgggagtaccaggagttaacgcacaccaaggagaagcctggcattattcatatgtgccaagcccctaataaatgagggtcattaaaaagggcaagaccacgttgttatgaacaatggcctgagcacctcctgagtgcaagcacggtgcagatgttacaatacctctcatctgctcctccaaactccagtgagctaggcactactatccacctgcacagaaaaagctcagagcagttgggtacgctgcccagggtcacacagcccaggtccctgactcccagccctgtgtctttccacagtccctaactctctgggccccaaggccaccctgatgttagcacctccactaccccaccttataaatcagagctcttttgtccttttcccccgcccccatcaggcctctccatgacacctacctgtgctccagcagcttgggctgagggtactgtgacctgcaaccaagaaggaccagtgatggaggagagccaccaccctcacggccacaaaagaggaaatgccagtctccttaccataccacgggctggagtggcttctccctcttgtagtgcagcttcatgttgctggtggcagaggcaagaaagagccatcatcatgggtctggggacagagacactcagcacaggaagaaggaggagtcagaggcccctgcgggtgggcacccagggtccatgcaggctccctctgaccttcccccacagccccacccgactctacagaggagctggggacccctacagaagtgatctgtccagggtcactgagagagtaagtggcagggcagtgattcgaacccagtgccgcttgctcccaaggctgatgcttttccaaccatgtcgctctcgttgtcggaaagaagatgtgaaaacctgcaaagggccaggcgcggtggctcacgcctgtaatcccagcactttgggaggcggaggcgggtggatcacaaggccaggagttcaagaccagcctggccaagatggtgaaacctcgtctctactaaaaatacaaaaattagctgggcatggtggcgggcgcctgtaatcccagctactcgggaggctgaggcaggagaattgcttgaacccaggaggcagaggttgcagtgagccgagatcgcaccattgcactacagcctgtgtgacagagcaagattccatctcaaaaaaaaaaaggaagaaaagctgcaaaggcctggtgactgggacctcgggtgagctaagagctaattaacctgagcccactgtaatggtcagttgtaggcaatcctcctgccttagcctcctgagtagctggacctgccaggcactcattaccacccccggctgattttttaaaattttgtagagatggggtcttactatgtcgcccaggctggtctgtgaaagtattttgtagatgtgattaacattctatatcagttgattttacataaaagagagtatcctagacaacctgggtgggaccgatccaattggttgaaaggccttaagaacagaactggtggccagcccaggtggctcacacctgtagtcccagcactttgggggcccaacgcgggcaaagcgcttgagcccagtagttcaagaccagcctgggcaacatggcaagacctcatctctacaaaaacaacaaaaattagctgggtatggtggtgtgcacctgtggtcctggctacttgggaggctgaagcaggaggatggcttgagcccaggaggtggaggctgtagtgagctgtaatcacactactgcactccagcctgggccacccacaaagtgagaccctgtctcaaaaaaaaaaaaaaaaaaaagaacttcacctgtgggctgtggtgtctgctcctatctgagtttcagctgcttagccagcctcaccatcacataagtcaattttcctaggtatgttggccatctgtctaccttcctacctcttactggttctgtttctctagtggaacactgactgccatttctctgcatctgcaaaatgggcaaaaccatccttagccttagcgatgtggtgagagttacacaaggtgtgtgaggggctcttgaccatgtccagcatggagcaagtgctcagtaaggtgagggatcctgggcaagtcttggcaggcagcctccatggtcagtttcaaggtcaaactggttggagaagaaagaagggggtccatgaaggaggtgccagggctgtagggtcagacccctgggctcacctctggctctgccactaactggcccagggacctggagccagacagttgaccctgtgaactttagtttcctcatccacaaaatggggacaataaaaccatccacttagagtgtttccagcaggtggaagcgaggtgcagagaagggaaagaccggccgggcgtggtggctcatgcctgtaatcccagcactttgggaggccaaagcgggcagatcacaaggtcgagagatcgagaccatcctgggcaacatggtgaaaccccatttctactaaaaatacaaaaattagctgggcgtggtggtgggcacctgtagtcccagctacttgggaggctgagggaggagaatcgcttgaacccgggaggctgagggtgcagtgagccgagatcccgccactgcactccagcctggcgacagagcaagactgcatctcaaaaaaaagggaaaggccacccagccagcagcagcaacaaaaggcccgaggccgactgtccccaggcagaagctcataaggatcccacccactgatgacacagtagtctgccaggtccttgtaagtttcttttctttctttcttttcttttttgaggtggggtctatctgtgttgcccaggctggagtgcagtggcacaatctcggctaactgcagtcttgactgcctgagctcaagcggtcctcccacaccagcaccctgaggagctgagaccacaggtgcccaccaccacacccagctgtttttgtattaatattttttgtacagactgggtttcaccatgttgcccaggctggtcttgaactcctgagctcaagtgatctgcctgtcttggcttcccaaagtgctgggattacaggcatgagctgccttgcctggtcccctgtgagtttcaatacatcatgtatgatggggtggctgaagcctccttgaactcttccacctctaggctatgctcttttatttgtggtaaagtatacaaaacacaagatttactactttagccatctttaagtgtacaattcagtggcattaggtacattcacattgtcatgcaaccatccaacatttgtgtccagaactttttcatcatcccaaaaggaagctcggtcctcattaaacaacagcttgccgttgccccgcccccagcccctgggaaccataattctacttctgcctctatgaacttgagtatggaaagtacttcctataagtggaataataaagtttttgtccttttgtgattagtagctacttttttttttctttttttagatggagtctcagtaaccttgtcatcccagctggagtgcagtggtgtgatcttggctcactgtaaccttagcctcctgggatcaagtgattctcctgcctcagcctcccaagtagctgggactacaggtgtgtgccaccacaccccgccaatttttgtatttttattagagatggggtttcatcatgttggccaggctggtcttgaactcctgagctcaagtgat
